(19) United States
(12) Patent Application Publication
(10) Pub. No.: US 2023/0051406 A1
(43) Pub. Date: Feb. 16, 2023

(54) GENETICALLY MODIFIED NATURAL KILLER CELLS AND METHODS OF USE THEREOF

(71) Applicant: Catamaran Bio, Inc., Cambridge, MA (US)

(72) Inventors: Vipin SURI, Belmont, MA (US); Bharat Duttala REDDY, Somerville, MA (US); Mark Ferris BOSHAR, Andover, MA (US); Celeste Jeanne RICHARDSON, Brookline, MA (US); Eugene Daehee CHOI, Arlington, MA (US); Meghan Elizabeth WALSH, Medford, MA (US); Jennifer Ann JOHNSON, Newburyport, MA (US)

(21) Appl. No.: 17/525,525

(22) Filed: Nov. 12, 2021

Related U.S. Application Data
(60) Provisional application No. 63/229,022, filed on Aug. 3, 2021.
(60) Provisional application No. 63/189,029, filed on May 14, 2021.
(60) Provisional application No. 63/143,180, filed on Jan. 29, 2021.
(60) Provisional application No. 63/113,318, filed on Nov. 13, 2020.

(51) Int. Cl. A61K 35/17; C12N 15/63; C12N 5/0783; A61P 35/00; C07K 14/54; C07K 14/55

(52) U.S. Cl. CPC A61K 35/17; C12N 15/63; C07K 14/55; A61P 35/00; C07K 14/5443; C12N 5/0646

(57) ABSTRACT

This disclosure describes genetically engineered natural killer (NK) cells, pharmaceutical compositions that include these NK cells, and methods of making and using these NK cells.

### CROSS-REFERENCE TO RELATED APPLICATION

[0001] This application claims priority to, and benefit of, U.S. Provisional Application No. 63/113,318, filed on Nov. 13, 2020; U.S. Provisional Application No. 63/143,180, filed on Jan. 29, 2021; U.S. Provisional Application No. 63/189,029, filed on May 14, 2021; and U.S. Provisional Application No. 63/229,022, filed on Aug. 3, 2021, the contents of which are incorporated by reference in their entirety.

### FIELD

[0002] The present disclosure relates generally to the fields of molecular biology, immunology, oncology and medicine. More particularly, it concerns natural killer cells expressing chimeric antigen receptors, such as chimeric antigen receptors that bind to a target protein.

### DESCRIPTION OF THE TEXT FILE SUBMITTED ELECTRONICALLY

[0003] The Sequence Listing associated with this application is provided in text format in lieu of a paper copy, and is hereby incorporated by reference into the specification. The name of the text file containing the Sequence Listing is “CATA-002_001US_SeqListing_ST25.txt”. The text file is 2,460 KB, was created on Nov. 12, 2021, and is being submitted electronically via EFS-Web.

### BACKGROUND

[0004] In recent years, adoptive cellular therapy using autologous T cells transduced to express chimeric antigen receptor (CARs) has proven to be a very powerful approach for the treatment of cancer, leading to U.S. Food and Drug Administration- (FDA) approved cell therapies for B cell leukemia and lymphoma. However, challenges remain, including uncoupling cytotoxicity against tumor cells from systemic toxicity, finding solutions for target antigen negative relapses, and developing universal off-the-shelf cell therapy products to avoid the logistic hurdles of generating autologous products, while managing the challenges of allogeneic T cell products, such as graft-versus-host disease (GVHD) (Hartmann et al. (2017) EMBO Mol. Med. 9:1183-97). Additional challenges of T cell therapies include the risk of cytokine release syndrome (CRS) and the difficulty of multifactorial engineering of T cell therapies that require both gene addition and deletion strategies.

[0005] Natural killer (NK) cells are attractive contenders since they mediate effective cytotoxicity against tumor cells and unlike T cells, lack the potential to cause GVHD in the allogeneic setting. Thus, NK cells could be made available as an off-the-shelf cellular therapy product for immediate clinical use (Daher et al. (2018) Curr. Opin. Immunol. 51: 146-153). Peripheral blood and cord blood are readily available sources of allogeneic NK cells with the potential for widespread clinical scalability. In addition, NK cells can also be obtained from differentiation of inducible pluripotent stem cells (iPSCs) or CD34⁺ hematopoietic stem cells (HSCs).

[0006] Cluster of Differentiation 70 (CD70, CD27LG or TNFSF7) is a member of the tumor necrosis factor (TNF) superfamily and is the membrane-bound ligand for CD27 receptor, which belongs to the TNF receptor superfamily (Hintzen et al. Int Immunol. 6(3): 477-80, 1994; Bowman et al. J Immunol. 152(4):1756-61, 1994). Physiologically, CD70 expression is transient and restricted to a subset of highly activated T cells, B cells, and dendritic cells. The transient interaction between CD27 and CD70 provides T cell costimulation complementary to that provided by CD28. Expression of CD70 is highly regulated and occurs in healthy individuals only transiently on activated T cells, antigen and Toll-like receptor-stimulated B cells, mature dendritic cells, NK cells and on dendritic and epithelial cells of the thymic medulla (Wajant et al. Expert Opin. Ther. Targets 20(8): 959-7 2016). CD70 is expressed in hematological cancers such as Acute Myeloid Leukemia (AML), Non-Hodgkin's Lymphoma, such as diffuse large B cell and follicular lymphoma and malignant cells of Hodgkin's lymphoma (Reed-Sternberg cells), Waldenstrom's macroglobulinemia and multiple myeloma, and by HTLV-1- and EBV-associated malignancies. (Agathanggelou et al. Am. J Pathol. 147(4):1152-60, 1995; Lens et al. Br J Haematol. 106(2): 491-503, 1999; Baba et al. J Virol. 82(8): 3843-52, 2008). In addition, CD70 is expressed by non-hematological malignancies such as renal cell carcinoma (RCC), small cell lung cancer (SCLC), pancreatic cancer, esophageal carcinoma, gastric carcinoma, mesothelioma, and glioblastoma (Dunker et al. J. Urol. 173(6): 2150-3, 2005; Chahlavi et al. Cancer Res. 65(12): 5428-38, 2005; Flieswasser et al. Cancers (Basel) 11(10):1611, 2019).

[0007] There is a need in the art for alternative approaches for generating genetically engineered NK cells that are useful as therapeutics. The present disclosure addresses this unmet need in the art.

### SUMMARY

[0008] Provided herein is a method of making a population of genetically engineered natural killer (NK) cells by: (a) contacting a population of NK cells with a CD70 inhibitor; and (b) expanding the population of NK cells in vitro.

[0009] In some embodiments, the population of NK cells is a population of human NK cells. In some embodiments, the population of NK cells exhibits at least about 25% greater cell expansion compared to a population of NK cells that is not contacted with the CD70 inhibitor. In some embodiments, the method further comprises, prior to step (a), isolating CD56⁺ cells and/or CD3⁻/CD56⁺ cells from a population of peripheral blood mononuclear cells (PBMCs) to obtain the population of NK cells.

[0010] In some embodiments, the expanding comprises culturing the population of NK cells in the presence of feeder cells. In certain embodiments, the feeder cells are an immortalized cell line. In other embodiments, the feeder cells are autologous feeder cells. In particular embodiments, the feeder cells have been irradiated.

[0011] In some embodiments, the expanding comprises culturing the population of NK cells in a culture medium comprising one or more of recombinant human IL-12, recombinant human IL-8, and recombinant human IL-21. In some embodiments, the expanding is performed from about 1 day to about 42 days.

[0012] In some embodiments, the CD70 inhibitor decreases the level of CD70 polypeptide in at least one NK cell of the population of NK cells. In some embodiments, the CD70 inhibitor comprises a small interfering RNA (siRNA) that targets CD70 mRNA, a short hairpin RNA (shRNA) that targets CD70 mRNA, a nucleic acid encoding a siRNA that targets CD70 mRNA, a nucleic acid encoding an shRNA that targets CD70 mRNA, a nucleic acid encoding a tandem shRNA that targets CD70 mRNA, a tandem shRNA that targets CD70 mRNA, a nucleic acid encoding a ribozyme that targets CD70 mRNA, or a ribozyme that targets CD70 mRNA, or a combination of any of the foregoing. In some embodiments, the CD70 inhibitor comprises an RNA-guided endonuclease and a guide RNA (gRNA) targeting a CD70 gene. In some embodiments, the CD70 inhibitor decreases cell surface level of CD70 polypeptide in at least one NK cell of the population of NK cells.

[0013] In some embodiments, the CD70 inhibitor comprises a Protein Expression Blocker (PEBL) or a nucleic acid encoding a PEBL, wherein the PEBL comprises a first antigen recognition domain that specifically binds human CD70 and one or more of a localizing domain, an intracellular retention domain and an endoplasmic reticulum (ER) retention domain.

[0014] In some embodiments, the CD70 inhibitor comprises an antagonistic anti-CD70 antibody or an antigen-binding fragment thereof. In certain embodiments, the antagonistic anti-CD70 antibody or the antigen-binding fragment thereof inhibits the interaction between CD70 and CD27. In particular embodiments, the antagonistic anti-CD70 antibody or the antigen-binding fragment thereof comprises a VH and a VL wherein a) the VH comprises SEQ ID NO: 1162 and the VL comprises SEQ ID NO: 1163; b) the VH comprises SEQ ID NO: 51 and the VL comprises SEQ ID NO: 53; c) the VH comprises SEQ ID NO: 11 and the VL comprises SEQ ID NO: 13; d) the VH comprises SEQ ID NO: 694 and the VL comprises SEQ ID NO: 69; e) the VH comprises SEQ ID NO: 1118 and the VL comprises SEQ ID NO: 1119; f) the VH comprises SEQ ID NO: 1120 and the VL comprises SEQ ID NO: 1121; g) the VH comprises SEQ ID NO: 1116 and the VL comprises SEQ ID NO: 1117; h) the VH comprises SEQ ID NO: 1104 and the VL comprises SEQ ID NO: 1105; i) the VH comprises SEQ ID NO: 1094 and the VL comprises SEQ ID NO: 1095; j) the VH comprises SEQ ID NO: 1084 and the VL comprises SEQ ID NO: 1085; k) the VH comprises SEQ ID NO: 1092 and the VL comprises SEQ ID NO: 1093; 1) the VH comprises SEQ ID NO: 1082 and the VL comprises SEQ ID NO: 1083; or m) the VH comprises SEQ ID NO: 1074 and the VL comprises SEQ ID NO: 1075. In specific embodiments, the antagonistic anti-CD70 antibody is cusatuzumab, MDX-1411, 27B3, 57B6, 59D10, 19G10, 9B2, 5B2, 9G2, 5F4, 9D1, and/or SGN70.

[0015] In some embodiments, the method further comprises (c) contacting the population of NK cells with a polynucleotide encoding a chimeric antigen receptor (CAR) under conditions sufficient to transfer the polynucleotide across a cell membrane of at least one NK cell in the population of NK cells, wherein the CAR comprises: (i) an extracellular domain comprising a second antigen recognition domain that specifically binds human CD70; (ii) a transmembrane domain; and (iii) an intracellular domain. In some embodiments, the CAR comprises an amino acid an amino acid sequence that is at least 90%, at least 91%, at least 92%, at least 93%, at least 94%, at least 95%, at least 96%, at least 97%, at least 98%, at least 99% or at least 100% identical to the amino acid sequence of SEQ ID NO: 637, 639, 641, 643, 645, 647, 700, 2561-2593, 2697-2736 or 2737-2882. In certain embodiments, the method further comprises expanding the population of NK cells in vitro after step (c).

[0016] In some embodiments of the aforementioned method, step (b) comprises expanding the population of NK cells by at least 1,000-fold in culture.

[0017] In some embodiments, the second antigen recognition domain comprises a scFv comprising a VH and a VL, wherein (a) the VH comprises a CDRH1 of SEQ ID NO: 86, a CDRH2 of SEQ ID NO: 87, and a CDRH3 of SEQ ID NO: 88, and the VL comprises a CDRL1 of SEQ ID NO: 89, a CDRL2 of SEQ ID NO: 90, and a CDRL3 of SEQ ID NO: 91; (b) the VH comprises a CDRH1 of SEQ ID NO: 25, a CDRH2 of SEQ ID NO: 26, and a CDRH3 of SEQ ID NO: 27, and the VL comprises a CDRL1 of SEQ ID NO: 28, a CDRL2 of SEQ ID NO: 29, and a CDRL3 of SEQ ID NO: 30; (c) the VH comprises a CDRH1 of SEQ ID NO: 35, a CDRH2 of SEQ ID NO: 36, and a CDRH3 of SEQ ID NO: 37, and the VL comprises a CDRL1 of SEQ ID NO: 38, a CDRL2 of SEQ ID NO: 39, and a CDRL3 of SEQ ID NO: 40; (d) the VH comprises a CDRH1 of SEQ ID NO: 45, a CDRH2 of SEQ ID NO: 46, and a CDRH3 of SEQ ID NO: 47, and the VL comprises a CDRL1 of SEQ ID NO: 48, a CDRL2 of SEQ ID NO: 49, and a CDRL3 of SEQ ID NO: 50; (e) the VH comprises a CDRH1 of SEQ ID NO: 55, a CDRH2 of SEQ ID NO: 56, and a CDRH3 of SEQ ID NO: 57, and the VL comprises a CDRL1 of SEQ ID NO: 58, a CDRL2 of SEQ ID NO: 59, and a CDRL3 of SEQ ID NO: 60; (f) the VH comprises a CDRH1 of SEQ ID NO: 15, a CDRH2 of SEQ ID NO: 16, and a CDRH3 of SEQ ID NO: 17, and the VL comprises a CDRL1 of SEQ ID NO: 18, a CDRL2 of SEQ ID NO: 19, and a CDRL3 of SEQ ID NO: 20; (g) the VH comprises a CDRH1 of SEQ ID NO: 96, a CDRH2 of SEQ ID NO: 97, and a CDRH3 of SEQ ID NO: 98, and the VL comprises a CDRL1 of SEQ ID NO: 99, a CDRL2 of SEQ ID NO: 100, and a CDRL3 of SEQ ID NO: 101; (h) the VH comprises a CDRH1 of SEQ ID NO: 196, a CDRH2 of SEQ ID NO: 197, and a CDRH3 of SEQ ID NO: 198, and the VL comprises a CDRL1 of SEQ ID NO: 478, a CDRL2 of SEQ ID NO: 479, and a CDRL3 of SEQ ID NO: 480; (i) the VH comprises a CDRH1 of SEQ ID NO: 202, a CDRH2 of SEQ ID NO: 203, and a CDRH3 of SEQ ID NO: 204, and the VL comprises a CDRL1 of SEQ ID NO: 481, a CDRL2 of SEQ ID NO: 482, and a CDRL3 of SEQ ID NO: 483; (j) the VH comprises a CDRH1 of SEQ ID NO: 1170, a CDRH2 of SEQ ID NO: 1171, and a CDRH3 of SEQ ID NO: 1172, and the VL comprises a CDRL1 of SEQ ID NO: 1857, a CDRL2 of SEQ ID NO: 1858, and a CDRL3 of SEQ ID NO: 1859; (k) the VH comprises a CDRH1 of SEQ ID NO: 1173, a CDRH2 of SEQ ID NO: 1174, and a CDRH3 of SEQ ID NO: 1175, and the VL comprises a CDRL1 of SEQ ID NO: 1860, a CDRL2 of SEQ ID NO: 1861, and a CDRL3 of SEQ ID NO: 1862; (1) the VH comprises a CDRH1 of SEQ ID NO: 1176, a CDRH2 of SEQ ID NO: 1177, and a CDRH3 of SEQ ID NO: 1178, and the VL comprises a CDRL1 of SEQ ID NO: 1863, a CDRL2 of SEQ ID NO: 1864, and a CDRL3 of SEQ ID NO: 1865; (m) the VH comprises a CDRH1 of SEQ ID NO: 1179, a CDRH2 of SEQ ID NO: 1180, and a CDRH3 of SEQ ID NO: 1181, and the VL comprises a CDRL1 of SEQ ID NO: 1866, a CDRL2 of SEQ ID NO: 1867, and a CDRL3 of SEQ ID NO: 1868; (n) the VH comprises a CDRH1 of SEQ ID NO: 1182, a CDRH2 of SEQ ID NO: 1183, and a CDRH3 of SEQ ID NO: 1184, and the VL comprises a CDRL1 of SEQ ID NO: 1869, a CDRL2 of SEQ ID NO: 1870, and a CDRL3 of SEQ ID NO: 1871; (o) the VH comprises a CDRH1 of SEQ ID NO: 1185, a CDRH2 of SEQ ID NO: 1186, and a CDRH3 of SEQ ID NO: 1187, and the VL comprises a CDRL1 of SEQ ID NO: 1872, a CDRL2 of SEQ ID NO: 1873, and a CDRL3 of SEQ ID NO: 1874; (p) the VH comprises a CDRH1 of SEQ ID NO: 1188, a CDRH2 of SEQ ID NO: 1189, and a CDRH3 of SEQ ID NO: 1190, and the VL comprises a CDRL1 of SEQ ID NO: 1875, a CDRL2 of SEQ ID NO: 1876, and a CDRL3 of SEQ ID NO: 1877; (q) the VH comprises a CDRH1 of SEQ ID NO: 1524, a CDRH2 of SEQ ID NO: 1525, and a CDRH3 of SEQ ID NO: 1526, and the VL comprises a CDRL1 of SEQ ID NO: 2211, a CDRL2 of SEQ ID NO: 2212, and a CDRL3 of SEQ ID NO: 2213; (r) the VH comprises a CDRH1 of SEQ ID NO: 1527, a CDRH2 of SEQ ID NO: 1528, and a CDRH3 of SEQ ID NO: 1529, and the VL comprises a CDRL1 of SEQ ID NO: 2214, a CDRL2 of SEQ ID NO: 2215, and a CDRL3 of SEQ ID NO: 2216; (s) the VH comprises a CDRH1 of SEQ ID NO: 1530, a CDRH2 of SEQ ID NO: 1531, and a CDRH3 of SEQ ID NO: 1532, and the VL comprises a CDRL1 of SEQ ID NO: 2217, a CDRL2 of SEQ ID NO: 2218, and a CDRL3 of SEQ ID NO: 2219; (t) the VH comprises a CDRH1 of SEQ ID NO: 1533, a CDRH2 of SEQ ID NO: 1534, and a CDRH3 of SEQ ID NO: 1535, and the VL comprises a CDRL1 of SEQ ID NO: 2220, a CDRL2 of SEQ ID NO: 2221, and a CDRL3 of SEQ ID NO: 2222; (u) the VH comprises a CDRH1 of SEQ ID NO: 1539, a CDRH2 of SEQ ID NO: 1540, and a CDRH3 of SEQ ID NO: 1541, and the VL comprises a CDRL1 of SEQ ID NO: 2226, a CDRL2 of SEQ ID NO: 2227, and a CDRL3 of SEQ ID NO: 2228; (v) the VH comprises a CDRH1 of SEQ ID NO: 1542, a CDRH2 of SEQ ID NO: 1543, and a CDRH3 of SEQ ID NO: 1544, and the VL comprises a CDRL1 of SEQ ID NO: 2229, a CDRL2 of SEQ ID NO: 2230, and a CDRL3 of SEQ ID NO: 2231; (w) the VH comprises a CDRH1 of SEQ ID NO: 1548, a CDRH2 of SEQ ID NO: 1549, and a CDRH3 of SEQ ID NO: 1550, and the VL comprises a CDRL1 of SEQ ID NO: 2235, a CDRL2 of SEQ ID NO: 2236, and a CDRL3 of SEQ ID NO: 2237; (x) the VH comprises a CDRH1 of SEQ ID NO: 1551, a CDRH2 of SEQ ID NO: 1552, and a CDRH3 of SEQ ID NO: 1553, and the VL comprises a CDRL1 of SEQ ID NO: 2238, a CDRL2 of SEQ ID NO: 2239, and a CDRL3 of SEQ ID NO: 2240; (y) the VH comprises a CDRH1 of SEQ ID NO: 1554, a CDRH2 of SEQ ID NO: 1555, and a CDRH3 of SEQ ID NO: 1556, and the VL comprises a CDRL1 of SEQ ID NO: 2241, a CDRL2 of SEQ ID NO: 2242, and a CDRL3 of SEQ ID NO: 2243; (z) the VH comprises a CDRH1 of SEQ ID NO: 1557, a CDRH2 of SEQ ID NO: 1558, and a CDRH3 of SEQ ID NO: 1559, and the VL comprises a CDRL1 of SEQ ID NO: 2244, a CDRL2 of SEQ ID NO: 2245, and a CDRL3 of SEQ ID NO: 2246; (aa) the VH comprises a CDRH1 of SEQ ID NO: 1560, a CDRH2 of SEQ ID NO: 1561, and a CDRH3 of SEQ ID NO: 1562, and the VL comprises a CDRL1 of SEQ ID NO: 2247, a CDRL2 of SEQ ID NO: 2248, and a CDRL3 of SEQ ID NO: 2249; (bb) the VH comprises a CDRH1 of SEQ ID NO: 1563, a CDRH2 of SEQ ID NO: 1564, and a CDRH3 of SEQ ID NO: 1565, and the VL comprises a CDRL1 of SEQ ID NO: 2250, a CDRL2 of SEQ ID NO: 2251, and a CDRL3 of SEQ ID NO: 2252; (cc) the VH comprises a CDRH1 of SEQ ID NO: 1566, a CDRH2 of SEQ ID NO: 1567, and a CDRH3 of SEQ ID NO: 1568, and the VL comprises a CDRL1 of SEQ ID NO: 2253, a CDRL2 of SEQ ID NO: 2254, and a CDRL3 of SEQ ID NO: 2255; (dd) the VH comprises a CDRH1 of SEQ ID NO: 1572, a CDRH2 of SEQ ID NO: 1573, and a CDRH3 of SEQ ID NO: 1574, and the VL comprises a CDRL1 of SEQ ID NO: 2259, a CDRL2 of SEQ ID NO: 2260, and a CDRL3 of SEQ ID NO: 2261; (ee) the VH comprises a CDRH1 of SEQ ID NO: 1575, a CDRH2 of SEQ ID NO: 1576, and a CDRH3 of SEQ ID NO: 1577, and the VL comprises a CDRL1 of SEQ ID NO: 2262, a CDRL2 of SEQ ID NO: 2263, and a CDRL3 of SEQ ID NO: 2264; (ff) the VH comprises a CDRH1 of SEQ ID NO: 1578, a CDRH2 of SEQ ID NO: 1579, and a CDRH3 of SEQ ID NO: 1580, and the VL comprises a CDRL1 of SEQ ID NO: 2265, a CDRL2 of SEQ ID NO: 2266, and a CDRL3 of SEQ ID NO: 2267; (gg) the VH comprises a CDRH1 of SEQ ID NO: 1587, a CDRH2 of SEQ ID NO: 1588, and a CDRH3 of SEQ ID NO: 1589, and the VL comprises a CDRL1 of SEQ ID NO: 2274, a CDRL2 of SEQ ID NO: 2275, and a CDRL3 of SEQ ID NO: 2276; (hh) the VH comprises a CDRH1 of SEQ ID NO: 1590, a CDRH2 of SEQ ID NO: 1591, and a CDRH3 of SEQ ID NO: 1592, and the VL comprises a CDRL1 of SEQ ID NO: 2277, a CDRL2 of SEQ ID NO: 2278, and a CDRL3 of SEQ ID NO: 2279; (ii) the VH comprises a CDRH1 of SEQ ID NO: 1593, a CDRH2 of SEQ ID NO: 1594, and a CDRH3 of SEQ ID NO: 1595, and the VL comprises a CDRL1 of SEQ ID NO: 2280, a CDRL2 of SEQ ID NO: 2281, and a CDRL3 of SEQ ID NO: 2282; (jj) the VH comprises a CDRH1 of SEQ ID NO: 1596, a CDRH2 of SEQ ID NO: 1597, and a CDRH3 of SEQ ID NO: 1598, and the VL comprises a CDRL1 of SEQ ID NO: 2283, a CDRL2 of SEQ ID NO: 2284, and a CDRL3 of SEQ ID NO: 2285; (kk) the VH comprises a CDRH1 of SEQ ID NO: 1599, a CDRH2 of SEQ ID NO: 1560, and a CDRH3 of SEQ ID NO: 1561, and the VL comprises a CDRL1 of SEQ ID NO: 2286, a CDRL2 of SEQ ID NO: 2287, and a CDRL3 of SEQ ID NO: 2288; (11) the VH comprises a CDRH1 of SEQ ID NO: 1602, a CDRH2 of SEQ ID NO: 1603, and a CDRH3 of SEQ ID NO: 1604, and the VL comprises a CDRL1 of SEQ ID NO: 2289, a CDRL2 of SEQ ID NO: 2290, and a CDRL3 of SEQ ID NO: 2291; (mm) the VH comprises a CDRH1 of SEQ ID NO: 1605, a CDRH2 of SEQ ID NO: 1606, and a CDRH3 of SEQ ID NO: 1607, and the VL comprises a CDRL1 of SEQ ID NO: 2292, a CDRL2 of SEQ ID NO: 2293, and a CDRL3 of SEQ ID NO: 2294; (nn) the VH comprises a CDRH1 of SEQ ID NO: 1608, a CDRH2 of SEQ ID NO: 1609, and a CDRH3 of SEQ ID NO: 1610, and the VL comprises a CDRL1 of SEQ ID NO: 2295, a CDRL2 of SEQ ID NO: 2296, and a CDRL3 of SEQ ID NO: 2297; (oo) the VH comprises a CDRH1 of SEQ ID NO: 1611, a CDRH2 of SEQ ID NO: 1612, and a CDRH3 of SEQ ID NO: 1613, and the VL comprises a CDRL1 of SEQ ID NO: 2298, a CDRL2 of SEQ ID NO: 2299, and a CDRL3 of SEQ ID NO: 2300; (pp) the VH comprises a CDRH1 of SEQ ID NO: 1614, a CDRH2 of SEQ ID NO: 1615, and a CDRH3 of SEQ ID NO: 1616, and the VL comprises a CDRL1 of SEQ ID NO: 2301, a CDRL2 of SEQ ID NO: 2302, and a CDRL3 of SEQ ID NO: 2303; (qq) the VH comprises a CDRH1 of SEQ ID NO: 1617, a CDRH2 of SEQ ID NO: 1618, and a CDRH3 of SEQ ID NO: 1619, and the VL comprises a CDRL1 of SEQ ID NO: 2304, a CDRL2 of SEQ ID NO: 2305, and a CDRL3 of SEQ ID NO: 2306; (rr) the VH comprises a CDRH1 of SEQ ID NO: 1626, a CDRH2 of SEQ ID NO: 1627, and a CDRH3 of SEQ ID NO: 1628, and the VL comprises a CDRL1 of SEQ ID NO: 2313, a CDRL2 of SEQ ID NO: 2314, and a CDRL3 of SEQ ID NO: 2315; (ss) the VH comprises a CDRH1 of SEQ ID NO: 1629, a CDRH2 of SEQ ID NO: 1630, and a CDRH3 of SEQ ID NO: 1631, and the VL comprises a CDRL1 of SEQ ID NO: 2316, a CDRL2 of SEQ ID NO: 2317, and a CDRL3 of SEQ ID NO: 2318; (tt) the VH comprises a CDRH1 of SEQ ID NO: 1632, a CDRH2 of SEQ ID NO: 1633, and a CDRH3 of SEQ ID NO: 1634, and the VL comprises a CDRL1 of SEQ ID NO: 2319, a CDRL2 of SEQ ID NO: 2320, and a CDRL3 of SEQ ID NO: 2321; (uu) the VH comprises a CDRH1 of SEQ ID NO: 1635, a CDRH2 of SEQ ID NO: 1636, and a CDRH3 of SEQ ID NO: 1637, and the VL comprises a CDRL1 of SEQ ID NO: 2322, a CDRL2 of SEQ ID NO: 2323, and a CDRL3 of SEQ ID NO: 2324; (vv) the VH comprises a CDRH1 of SEQ ID NO: 1638, a CDRH2 of SEQ ID NO: 1639, and a CDRH3 of SEQ ID NO: 1640, and the VL comprises a CDRL1 of SEQ ID NO: 2325, a CDRL2 of SEQ ID NO: 2326, and a CDRL3 of SEQ ID NO: 2327; (ww) the VH comprises a CDRH1 of SEQ ID NO: 1641, a CDRH2 of SEQ ID NO: 1642, and a CDRH3 of SEQ ID NO: 1643, and the VL comprises a CDRL1 of SEQ ID NO: 2328, a CDRL2 of SEQ ID NO: 2329, and a CDRL3 of SEQ ID NO: 2330; (xx) the VH comprises a CDRH1 of SEQ ID NO: 1644, a CDRH2 of SEQ ID NO: 1645, and a CDRH3 of SEQ ID NO: 1646, and the VL comprises a CDRL1 of SEQ ID NO: 2331, a CDRL2 of SEQ ID NO: 2332, and a CDRL3 of SEQ ID NO: 2333; (yy) the VH comprises a CDRH1 of SEQ ID NO: 1647, a CDRH2 of SEQ ID NO: 1648, and a CDRH3 of SEQ ID NO: 1649, and the VL comprises a CDRL1 of SEQ ID NO: 2334, a CDRL2 of SEQ ID NO: 2335, and a CDRL3 of SEQ ID NO: 2336; (zz) the VH comprises a CDRH1 of SEQ ID NO: 1650, a CDRH2 of SEQ ID NO: 1651, and a CDRH3 of SEQ ID NO: 1652, and the VL comprises a CDRL1 of SEQ ID NO: 2337, a CDRL2 of SEQ ID NO: 2338, and a CDRL3 of SEQ ID NO: 2339; (aaa) the VH comprises a CDRH1 of SEQ ID NO: 1653, a CDRH2 of SEQ ID NO: 1654, and a CDRH3 of SEQ ID NO: 1655, and the VL comprises a CDRL1 of SEQ ID NO: 2340, a CDRL2 of SEQ ID NO: 2341, and a CDRL3 of SEQ ID NO: 2342; (bbb) the VH comprises a CDRH1 of SEQ ID NO: 1656, a CDRH2 of SEQ ID NO: 1657, and a CDRH3 of SEQ ID NO: 1658, and the VL comprises a CDRL1 of SEQ ID NO: 2343, a CDRL2 of SEQ ID NO: 2344, and a CDRL3 of SEQ ID NO: 2345; or (ccc) the VH comprises a CDRH1 of SEQ ID NO: 1659, a CDRH2 of SEQ ID NO: 1660, and a CDRH3 of SEQ ID NO: 1661, and the VL comprises a CDRL1 of SEQ ID NO: 2346, a CDRL2 of SEQ ID NO: 2347, and a CDRL3 of SEQ ID NO: 2348.

[0018] In some embodiments, the second antigen recognition domain comprises a scFv comprising a VH and a VL, wherein: (a) the VH comprises SEQ ID NO: 82 and the VL comprises SEQ ID NO: 84; (b) the VH comprises SEQ ID NO: 21 and the VL comprises SEQ ID NO: 23; (c) the VH comprises SEQ ID NO: 31 and the VL comprises SEQ ID NO: 33; (d) the VH comprises SEQ ID NO: 41 and the VL comprises SEQ ID NO: 43; (e) the VH comprises SEQ ID NO: 51 and the VL comprises SEQ ID NO: 53; (f) the VH comprises SEQ ID NO: 61 and the VL comprises SEQ ID NO: 63; (g) the VH comprises SEQ ID NO: 693 and the VL comprises SEQ ID NO: 66; (h) the VH comprises SEQ ID NO: 694 and the VL comprises SEQ ID NO: 69; (i) the VH comprises SEQ ID NO: 695 and the VL comprises SEQ ID NO: 72; (j) the VH comprises SEQ ID NO: 74 and the VL comprises SEQ ID NO: 76; (k) the VH comprises SEQ ID NO: 78 and the VL comprises SEQ ID NO: 80; (1) the VH comprises SEQ ID NO: 11 and the VL comprises SEQ ID NO: 13; (m) the VH comprises SEQ ID NO: 92 and the VL comprises SEQ ID NO: 94; (n) the VH comprises SEQ ID NO: 102 and the VL comprises SEQ ID NO: 103; (o) the VH comprises SEQ ID NO: 104 and the VL comprises SEQ ID NO: 105; (p) the VH comprises SEQ ID NO: 712 and the VL comprises SEQ ID NO: 713; (q) the VH comprises SEQ ID NO: 714 and the VL comprises SEQ ID NO: 715; (r) the VH comprises SEQ ID NO: 716 and the VL comprises SEQ ID NO: 717; (s) the VH comprises SEQ ID NO: 718 and the VL comprises SEQ ID NO: 719; (t) the VH comprises SEQ ID NO: 720 and the VL comprises SEQ ID NO: 721; (u) the VH comprises SEQ ID NO: 722 and the VL comprises SEQ ID NO: 723; (v) the VH comprises SEQ ID NO: 724 and the VL comprises SEQ ID NO: 725; (w) the VH comprises SEQ ID NO: 948 and the VL comprises SEQ ID NO: 949; (x) the VH comprises SEQ ID NO: 950 and the VL comprises SEQ ID NO: 951; (y) the VH comprises SEQ ID NO: 952 and the VL comprises SEQ ID NO: 953; (z) the VH comprises SEQ ID NO: 954 and the VL comprises SEQ ID NO: 955; (aa) the VH comprises SEQ ID NO: 958 and the VL comprises SEQ ID NO: 959; (bb) the VH comprises SEQ ID NO: 960 and the VL comprises SEQ ID NO: 961; (cc) the VH comprises SEQ ID NO: 964 and the VL comprises SEQ ID NO: 965; (dd) the VH comprises SEQ ID NO: 966 and the VL comprises SEQ ID NO: 967; (ee) the VH comprises SEQ ID NO: 968 and the VL comprises SEQ ID NO: 969; (ff) the VH comprises SEQ ID NO: 970 and the VL comprises SEQ ID NO: 971; (gg) the VH comprises SEQ ID NO: 972 and the VL comprises SEQ ID NO: 973; (hh) the VH comprises SEQ ID NO: 974 and the VL comprises SEQ ID NO: 975; (ii) the VH comprises SEQ ID NO: 976 and the VL comprises SEQ ID NO: 977; (jj) the VH comprises SEQ ID NO: 980 and the VL comprises SEQ ID NO: 981; (kk) the VH comprises SEQ ID NO: 982 and the VL comprises SEQ ID NO: 983; (11) the VH comprises SEQ ID NO: 984 and the VL comprises SEQ ID NO: 985; (mm) the VH comprises SEQ ID NO: 990 and the VL comprises SEQ ID NO: 991; (nn) the VH comprises SEQ ID NO: 992 and the VL comprises SEQ ID NO: 993; (oo) the VH comprises SEQ ID NO: 994 and the VL comprises SEQ ID NO: 995; (pp) the VH comprises SEQ ID NO: 996 and the VL comprises SEQ ID NO: 997; (qq) the VH comprises SEQ ID NO: 998 and the VL comprises SEQ ID NO: 999; (rr) the VH comprises SEQ ID NO: 1000 and the VL comprises SEQ ID NO: 1001; (ss) the VH comprises SEQ ID NO: 1002 and the VL comprises SEQ ID NO: 1003; (tt) the VH comprises SEQ ID NO: 1004 and the VL comprises SEQ ID NO: 1005; (uu) the VH comprises SEQ ID NO: 1006 and the VL comprises SEQ ID NO: 1007; (vv) the VH comprises SEQ ID NO: 1008 and the VL comprises SEQ ID NO: 1009; (ww) the VH comprises SEQ ID NO: 1010 and the VL comprises SEQ ID NO: 1011; (xx) the VH comprises SEQ ID NO: 1016 and the VL comprises SEQ ID NO: 1017; (yy) the VH comprises SEQ ID NO: 1018 and the VL comprises SEQ ID NO: 1019; (zz) the VH comprises SEQ ID NO: 1020 and the VL comprises SEQ ID NO: 1021; (aaa) the VH comprises SEQ ID NO: 1022 and the VL comprises SEQ ID NO: 1023; (bbb) the VH comprises SEQ ID NO: 1024 and the VL comprises SEQ ID NO: 1025; (ccc) the VH comprises SEQ ID NO: 1026 and the VL comprises SEQ ID NO: 1027; (ddd) the VH comprises SEQ ID NO: 1028 and the VL comprises SEQ ID NO: 1029; (eee) the VH comprises SEQ ID NO: 1030 and the VL comprises SEQ ID NO: 1031; (fff) the VH comprises SEQ ID NO: 1032 and the VL comprises SEQ ID NO: 1033; (ggg) the VH comprises SEQ ID NO: 1034 and the VL comprises SEQ ID NO: 1035; (hhh) the VH comprises SEQ ID NO: 1036 and the VL comprises SEQ ID NO: 1037; or (iii) the VH comprises SEQ ID NO: 1038 and the VL comprises SEQ ID NO: 1039.

[0019] In some embodiments, the second antigen recognition domain comprises a single domain antibody fragment, an adnectin peptide, an affibody, an afflilin, an affimer, an affitin, an alphabody, an anticalin, an avimer, a DARPin (Designed Ankyrin Repeat Protein), a Fynomer, a Kunitz domain peptide, a monobody, a centyrin, an aptamer, a T cell receptor (TCR)-like antibody, a single chain TCR (scTCR), or a portion of any of the foregoing.

[0020] In some embodiments, the second antigen recognition domain comprises a human CD27 extracellular domain.

[0021] In some embodiments, the extracellular domain comprises a hinge.

[0022] In some embodiments, the transmembrane domain comprises a CD8, CD16, CD27, CD28, 2B4, NKG2D, NKp44, NKp46, NKp30, NKp80, DNAM-1, CD3 zeta, CD3 epsilon, CD3 gamma, CD3 delta, CD45, CD4, CD5, CD9, CD22, CD33, CD37, CD64, CD80, CD86, CD134, CD137, CD154, ICOS/CD278, GITR/CD357, DAP10, DAP12 or erythropoietin receptor transmembrane domain, a portion of any of the foregoing, or a combination of any of the foregoing.

[0023] In some embodiments, the intracellular domain comprises one or more costimulatory domain(s). In certain embodiments, the one or more costimulatory domain(s) are selected from the group consisting of: a CD28 costimulatory domain, a 4-1BB costimulatory domain, a DAP10 costimulatory domain, a DAP12 costimulatory domain, a 2B4 costimulatory domain, a OX40 costimulatory domain, an OX40L costimulatory domain, a ICOS costimulatory domain, or a CD27 costimulatory domain, or a portion of any of the foregoing.

[0024] In some embodiments, the intracellular domain comprises an activation domain. In certain embodiments, the activation domain comprises a DAP12, FCER1G, FCGR2A, or CD3zeta activation domain, or a portion of any of the foregoing.

[0025] In some embodiments, the aforementioned method further comprises: (e) contacting the population of NK cells with at least one polynucleotide encoding at least one exogenous polypeptide.

[0026] In some embodiments, the at least one exogenous polypeptide comprises a cytokine, a chemokine, a ligand, a receptor, a monoclonal antibody, a bispecific T cell engager, a peptide, or an enzyme, a subunit or a portion of the foregoing, or any combination of the foregoing. In certain embodiments, the at least one exogenous polypeptide comprises a cytokine. In particular, the cytokine comprises IL-15, membrane-bound IL-15 (mbIL-15), IL-2, membrane-bound IL-2, IL-12, membrane-bound IL-12, IL-18, membrane-bound IL-18, IL-21, membrane-bound IL-21, p40, LIGHT, CD40L, FLT3L, 4-1BBL, or FASL.

[0027] In some embodiments, the at least one exogenous polypeptide comprises IL-15RA, IL-15, or is a fusion protein comprising IL-15 and IL-15RA. In other embodiments, the at least one exogenous polypeptide is a tethered IL-21, a tethered IL-12, or a tethered IL-18. In some embodiments, the at least one exogenous polypeptide comprises a first exogenous polypeptide comprising mbIL-15 and a second exogenous polypeptide comprising IL-15RA. Alternatively, the at least one exogenous polypeptide comprises a receptor selected from the group consisting of: CSF-1R, a CXC chemokine receptor, a CC chemokine receptor, a CX3C chemokine receptor, a XC chemokine receptor, or a chemokine-binding fragment thereof. In some embodiments, the at least one exogenous polypeptide is a protein that overcomes immunosuppression of the tumor microenvironment. In certain embodiments, the protein comprises a TGFbeta signal converter. In particular, the TGFbeta signal converter comprises a TGFbeta receptor extracellular domain and an NK cell intracellular domain. In certain embodiments, the protein comprises a TGFbeta decoy receptor comprising a TGFbeta receptor extracellular domain and optionally, a transmembrane domain. In particular, the transmembrane domain is a transmembrane domain from a protein that is not a TGFbeta receptor. Alternatively, the transmembrane domain is a transmembrane domain from the TGFbeta receptor.

[0028] In some embodiments, the at least one exogenous polypeptide comprises a CAR comprising at least one antigen recognition domain that specifically binds an antigen other than human CD70. In certain embodiments, the antigen other than human CD70 is selected from the group consisting of: CAIX, CD19, CD20, CD22, CD33, CD37, CD79a, CD79b, CD96, CD123, CD138, CLL-1, CXCR5, BCMA, FOLR2, FCRL5, FLT3, GPRC5D, HAVCR1, Her2, mesothelin, MUC16, EGFR, EGFRVIII, IL13Ra2, Trop2, GPC3, FOLR1, and GD2. In some embodiments, the at least one exogenous polypeptide comprises a safety switch protein.

[0029] In some embodiments, the aforementioned method further comprises linking at least one exogenous polypeptide to at least one NK cell of the NK cell population by chemical conjugation or using a sortase enzyme.

[0030] Further provided herein is a genetically engineered natural killer (NK) cell modified to have: a) a decreased level of total expressed CD70 polypeptide compared to the level of total expressed CD70 polypeptide in a wild-type NK cell, and/or b) a decreased level of surface expressed CD70 polypeptide compared to the level of surface expressed CD70 in a wild-type NK cell.

[0031] In some embodiments, the genetically engineered NK cell comprises a disrupted CD70 gene. In certain embodiments, the genetically engineered NK cell comprises a knockout or knockdown of a CD70 gene. In some embodiments, the genetically engineered NK cell comprises at least about 30% less of surface expressed CD70 polypeptide and/or total expressed CD70 polypeptide than the wild-type NK cell. In some embodiments, the level of CD70 mRNA in the genetically engineered NK cell is reduced as compared to the level of CD70 mRNA in a wild-type NK cell.

[0032] In some embodiments, the genetically engineered NK cell comprises a siRNA that targets CD70 mRNA, a nucleic acid encoding a siRNA that targets CD70 mRNA, a shRNA that targets CD70 mRNA, a nucleic acid encoding a shRNA that targets CD70 mRNA, a nucleic acid encoding a tandem shRNA that targets CD70 mRNA, a tandem shRNA that targets CD70 mRNA, a nucleic acid encoding a ribozyme that targets CD70 mRNA, or a ribozyme that targets CD70 mRNA, or a combination of any of the foregoing. In some embodiments, the genetically engineered NK cell comprises an RNA guided endonuclease and a gRNA targeting a CD70 gene. In some embodiments, the genetically engineered NK cell comprises a PEBL or a nucleic acid encoding a PEBL, wherein the PEBL comprises a first antigen recognition domain that specifically binds human CD70 and one or more of a localizing domain, an intracellular retention domain and an ER retention domain.

[0033] In some embodiments, the genetically engineered NK cell is derived from umbilical cord blood cells, PBMCs, mobilized unstimulated leukapheresis products (PBSCs), unmobilized PBSCs, human embryonic stem cells (hESCs), induced pluripotent stem cells (iPSCs), mesenchymal stem cells (MSCs), hematopoietic stem cells (HSCs), bone marrow or CD34⁺ cells.

[0034] In some embodiments, the genetically engineered NK cell is a human NK cell.

[0035] In some embodiments, the genetically engineered NK cell comprises a CAR and/or a polynucleotide encoding the CAR, wherein the CAR comprises (a) an extracellular domain comprising a second antigen recognition domain that specifically binds human CD70; (b) a transmembrane domain; and (c) an intracellular domain. In certain embodiments, the second antigen recognition domain comprises a scFv comprising a VH and a VL, wherein (a) the VH comprises a CDRH1 of SEQ ID NO: 86, a CDRH2 of SEQ ID NO: 87, and a CDRH3 of SEQ ID NO: 88, and the VL comprises a CDRL1 of SEQ ID NO: 89, a CDRL2 of SEQ ID NO: 90, and a CDRL3 of SEQ ID NO: 91; (b) the VH comprises a CDRH1 of SEQ ID NO: 25, a CDRH2 of SEQ ID NO: 26, and a CDRH3 of SEQ ID NO: 27, and the VL comprises a CDRL1 of SEQ ID NO: 28, a CDRL2 of SEQ ID NO: 29, and a CDRL3 of SEQ ID NO: 30; (c) the VH comprises a CDRH1 of SEQ ID NO: 35, a CDRH2 of SEQ ID NO: 36, and a CDRH3 of SEQ ID NO: 37, and the VL comprises a CDRL1 of SEQ ID NO: 38, a CDRL2 of SEQ ID NO: 39, and a CDRL3 of SEQ ID NO: 40; (d) the VH comprises a CDRH1 of SEQ ID NO: 45, a CDRH2 of SEQ ID NO: 46, and a CDRH3 of SEQ ID NO: 47, and the VL comprises a CDRL1 of SEQ ID NO: 48, a CDRL2 of SEQ ID NO: 49, and a CDRL3 of SEQ ID NO: 50; (e) the VH comprises a CDRH1 of SEQ ID NO: 55, a CDRH2 of SEQ ID NO: 56, and a CDRH3 of SEQ ID NO: 57, and the VL comprises a CDRL1 of SEQ ID NO: 58, a CDRL2 of SEQ ID NO: 59, and a CDRL3 of SEQ ID NO: 60; (f) the VH comprises a CDRH1 of SEQ ID NO: 15, a CDRH2 of SEQ ID NO: 16, and a CDRH3 of SEQ ID NO: 17, and the VL comprises a CDRL1 of SEQ ID NO: 18, a CDRL2 of SEQ ID NO: 19, and a CDRL3 of SEQ ID NO: 20; (g) the VH comprises a CDRH1 of SEQ ID NO: 96, a CDRH2 of SEQ ID NO: 97, and a CDRH3 of SEQ ID NO: 98, and the VL comprises a CDRL1 of SEQ ID NO: 99, a CDRL2 of SEQ ID NO: 100, and a CDRL3 of SEQ ID NO: 101; (h) the VH comprises a CDRH1 of SEQ ID NO: 196, a CDRH2 of SEQ ID NO: 197, and a CDRH3 of SEQ ID NO: 198, and the VL comprises a CDRL1 of SEQ ID NO: 478, a CDRL2 of SEQ ID NO: 479, and a CDRL3 of SEQ ID NO: 480; (i) the VH comprises a CDRH1 of SEQ ID NO: 202, a CDRH2 of SEQ ID NO: 203, and a CDRH3 of SEQ ID NO: 204, and the VL comprises a CDRL1 of SEQ ID NO: 481, a CDRL2 of SEQ ID NO: 482, and a CDRL3 of SEQ ID NO: 483; (j) the VH comprises a CDRH1 of SEQ ID NO: 1170, a CDRH2 of SEQ ID NO: 1171, and a CDRH3 of SEQ ID NO: 1172, and the VL comprises a CDRL1 of SEQ ID NO: 1857, a CDRL2 of SEQ ID NO: 1858, and a CDRL3 of SEQ ID NO: 1859; (k) the VH comprises a CDRH1 of SEQ ID NO: 1173, a CDRH2 of SEQ ID NO: 1174, and a CDRH3 of SEQ ID NO: 1175, and the VL comprises a CDRL1 of SEQ ID NO: 1860, a CDRL2 of SEQ ID NO: 1861, and a CDRL3 of SEQ ID NO: 1862; (1) the VH comprises a CDRH1 of SEQ ID NO: 1176, a CDRH2 of SEQ ID NO: 1177, and a CDRH3 of SEQ ID NO: 1178, and the VL comprises a CDRL1 of SEQ ID NO: 1863, a CDRL2 of SEQ ID NO: 1864, and a CDRL3 of SEQ ID NO: 1865; (m) the VH comprises a CDRH1 of SEQ ID NO: 1179, a CDRH2 of SEQ ID NO: 1180, and a CDRH3 of SEQ ID NO: 1181, and the VL comprises a CDRL1 of SEQ ID NO: 1866, a CDRL2 of SEQ ID NO: 1867, and a CDRL3 of SEQ ID NO: 1868; (n) the VH comprises a CDRH1 of SEQ ID NO: 1182, a CDRH2 of SEQ ID NO: 1183, and a CDRH3 of SEQ ID NO: 1184, and the VL comprises a CDRL1 of SEQ ID NO: 1869, a CDRL2 of SEQ ID NO: 1870, and a CDRL3 of SEQ ID NO: 1871; (o) the VH comprises a CDRH1 of SEQ ID NO: 1185, a CDRH2 of SEQ ID NO: 1186, and a CDRH3 of SEQ ID NO: 1187, and the VL comprises a CDRL1 of SEQ ID NO: 1872, a CDRL2 of SEQ ID NO: 1873, and a CDRL3 of SEQ ID NO: 1874; (p) the VH comprises a CDRH1 of SEQ ID NO: 1188, a CDRH2 of SEQ ID NO: 1189, and a CDRH3 of SEQ ID NO: 1190, and the VL comprises a CDRL1 of SEQ ID NO: 1875, a CDRL2 of SEQ ID NO: 1876, and a CDRL3 of SEQ ID NO: 1877; (q) the VH comprises a CDRH1 of SEQ ID NO: 1524, a CDRH2 of SEQ ID NO: 1525, and a CDRH3 of SEQ ID NO: 1526, and the VL comprises a CDRL1 of SEQ ID NO: 2211, a CDRL2 of SEQ ID NO: 2212, and a CDRL3 of SEQ ID NO: 2213; (r) the VH comprises a CDRH1 of SEQ ID NO: 1527, a CDRH2 of SEQ ID NO: 1528, and a CDRH3 of SEQ ID NO: 1529, and the VL comprises a CDRL1 of SEQ ID NO: 2214, a CDRL2 of SEQ ID NO: 2215, and a CDRL3 of SEQ ID NO: 2216; (s) the VH comprises a CDRH1 of SEQ ID NO: 1530, a CDRH2 of SEQ ID NO: 1531, and a CDRH3 of SEQ ID NO: 1532, and the VL comprises a CDRL1 of SEQ ID NO: 2217, a CDRL2 of SEQ ID NO: 2218, and a CDRL3 of SEQ ID NO: 2219; (t) the VH comprises a CDRH1 of SEQ ID NO: 1533, a CDRH2 of SEQ ID NO: 1534, and a CDRH3 of SEQ ID NO: 1535, and the VL comprises a CDRL1 of SEQ ID NO: 2220, a CDRL2 of SEQ ID NO: 2221, and a CDRL3 of SEQ ID NO: 2222; (u) the VH comprises a CDRH1 of SEQ ID NO: 1539, a CDRH2 of SEQ ID NO: 1540, and a CDRH3 of SEQ ID NO: 1541, and the VL comprises a CDRL1 of SEQ ID NO: 2226, a CDRL2 of SEQ ID NO: 2227, and a CDRL3 of SEQ ID NO: 2228; (v) the VH comprises a CDRH1 of SEQ ID NO: 1542, a CDRH2 of SEQ ID NO: 1543, and a CDRH3 of SEQ ID NO: 1544, and the VL comprises a CDRL1 of SEQ ID NO: 2229, a CDRL2 of SEQ ID NO: 2230, and a CDRL3 of SEQ ID NO: 2231; (w) the VH comprises a CDRH1 of SEQ ID NO: 1548, a CDRH2 of SEQ ID NO: 1549, and a CDRH3 of SEQ ID NO: 1550, and the VL comprises a CDRL1 of SEQ ID NO: 2235, a CDRL2 of SEQ ID NO: 2236, and a CDRL3 of SEQ ID NO: 2237; (x) the VH comprises a CDRH1 of SEQ ID NO: 1551, a CDRH2 of SEQ ID NO: 1552, and a CDRH3 of SEQ ID NO: 1553, and the VL comprises a CDRL1 of SEQ ID NO: 2238, a CDRL2 of SEQ ID NO: 2239, and a CDRL3 of SEQ ID NO: 2240; (y) the VH comprises a CDRH1 of SEQ ID NO: 1554, a CDRH2 of SEQ ID NO: 1555, and a CDRH3 of SEQ ID NO: 1556, and the VL comprises a CDRL1 of SEQ ID NO: 2241, a CDRL2 of SEQ ID NO: 2242, and a CDRL3 of SEQ ID NO: 2243; (z) the VH comprises a CDRH1 of SEQ ID NO: 1557, a CDRH2 of SEQ ID NO: 1558, and a CDRH3 of SEQ ID NO: 1559, and the VL comprises a CDRL1 of SEQ ID NO: 2244, a CDRL2 of SEQ ID NO: 2245, and a CDRL3 of SEQ ID NO: 2246; (aa) the VH comprises a CDRH1 of SEQ ID NO: 1560, a CDRH2 of SEQ ID NO: 1561, and a CDRH3 of SEQ ID NO: 1562, and the VL comprises a CDRL1 of SEQ ID NO: 2247, a CDRL2 of SEQ ID NO: 2248, and a CDRL3 of SEQ ID NO: 2249; (bb) the VH comprises a CDRH1 of SEQ ID NO: 1563, a CDRH2 of SEQ ID NO: 1564, and a CDRH3 of SEQ ID NO: 1565, and the VL comprises a CDRL1 of SEQ ID NO: 2250, a CDRL2 of SEQ ID NO: 2251, and a CDRL3 of SEQ ID NO: 2252; (cc) the VH comprises a CDRH1 of SEQ ID NO: 1566, a CDRH2 of SEQ ID NO: 1567, and a CDRH3 of SEQ ID NO: 1568, and the VL comprises a CDRL1 of SEQ ID NO: 2253, a CDRL2 of SEQ ID NO: 2254, and a CDRL3 of SEQ ID NO: 2255; (dd) the VH comprises a CDRH1 of SEQ ID NO: 1572, a CDRH2 of SEQ ID NO: 1573, and a CDRH3 of SEQ ID NO: 1574, and the VL comprises a CDRL1 of SEQ ID NO: 2259, a CDRL2 of SEQ ID NO: 2260, and a CDRL3 of SEQ ID NO: 2261; (ee) the VH comprises a CDRH1 of SEQ ID NO: 1575, a CDRH2 of SEQ ID NO: 1576, and a CDRH3 of SEQ ID NO: 1577, and the VL comprises a CDRL1 of SEQ ID NO: 2262, a CDRL2 of SEQ ID NO: 2263, and a CDRL3 of SEQ ID NO: 2264; (ff) the VH comprises a CDRH1 of SEQ ID NO: 1578, a CDRH2 of SEQ ID NO: 1579, and a CDRH3 of SEQ ID NO: 1580, and the VL comprises a CDRL1 of SEQ ID NO: 2265, a CDRL2 of SEQ ID NO: 2266, and a CDRL3 of SEQ ID NO: 2267; (gg) the VH comprises a CDRH1 of SEQ ID NO: 1587, a CDRH2 of SEQ ID NO: 1588, and a CDRH3 of SEQ ID NO: 1589, and the VL comprises a CDRL1 of SEQ ID NO: 2274, a CDRL2 of SEQ ID NO: 2275, and a CDRL3 of SEQ ID NO: 2276; (hh) the VH comprises a CDRH1 of SEQ ID NO: 1590, a CDRH2 of SEQ ID NO: 1591, and a CDRH3 of SEQ ID NO: 1592, and the VL comprises a CDRL1 of SEQ ID NO: 2277, a CDRL2 of SEQ ID NO: 2278, and a CDRL3 of SEQ ID NO: 2279; (ii) the VH comprises a CDRH1 of SEQ ID NO: 1593, a CDRH2 of SEQ ID NO: 1594, and a CDRH3 of SEQ ID NO: 1595, and the VL comprises a CDRL1 of SEQ ID NO: 2280, a CDRL2 of SEQ ID NO: 2281, and a CDRL3 of SEQ ID NO: 2282; (jj) the VH comprises a CDRH1 of SEQ ID NO: 1596, a CDRH2 of SEQ ID NO: 1597, and a CDRH3 of SEQ ID NO: 1598, and the VL comprises a CDRL1 of SEQ ID NO: 2283, a CDRL2 of SEQ ID NO: 2284, and a CDRL3 of SEQ ID NO: 2285; (kk) the VH comprises a CDRH1 of SEQ ID NO: 1599, a CDRH2 of SEQ ID NO: 1560, and a CDRH3 of SEQ ID NO: 1561, and the VL comprises a CDRL1 of SEQ ID NO: 2286, a CDRL2 of SEQ ID NO: 2287, and a CDRL3 of SEQ ID NO: 2288; (11) the VH comprises a CDRH1 of SEQ ID NO: 1602, a CDRH2 of SEQ ID NO: 1603, and a CDRH3 of SEQ ID NO: 1604, and the VL comprises a CDRL1 of SEQ ID NO: 2289, a CDRL2 of SEQ ID NO: 2290, and a CDRL3 of SEQ ID NO: 2291; (mm) the VH comprises a CDRH1 of SEQ ID NO: 1605, a CDRH2 of SEQ ID NO: 1606, and a CDRH3 of SEQ ID NO: 1607, and the VL comprises a CDRL1 of SEQ ID NO: 2292, a CDRL2 of SEQ ID NO: 2293, and a CDRL3 of SEQ ID NO: 2294; (nn) the VH comprises a CDRH1 of SEQ ID NO: 1608, a CDRH2 of SEQ ID NO: 1609, and a CDRH3 of SEQ ID NO: 1610, and the VL comprises a CDRL1 of SEQ ID NO: 2295, a CDRL2 of SEQ ID NO: 2296, and a CDRL3 of SEQ ID NO: 2297; (oo) the VH comprises a CDRH1 of SEQ ID NO: 1611, a CDRH2 of SEQ ID NO: 1612, and a CDRH3 of SEQ ID NO: 1613, and the VL comprises a CDRL1 of SEQ ID NO: 2298, a CDRL2 of SEQ ID NO: 2299, and a CDRL3 of SEQ ID NO: 2300; (pp) the VH comprises a CDRH1 of SEQ ID NO: 1614, a CDRH2 of SEQ ID NO: 1615, and a CDRH3 of SEQ ID NO: 1616, and the VL comprises a CDRL1 of SEQ ID NO: 2301, a CDRL2 of SEQ ID NO: 2302, and a CDRL3 of SEQ ID NO: 2303; (qq) the VH comprises a CDRH1 of SEQ ID NO: 1617, a CDRH2 of SEQ ID NO: 1618, and a CDRH3 of SEQ ID NO: 1619, and the VL comprises a CDRL1 of SEQ ID NO: 2304, a CDRL2 of SEQ ID NO: 2305, and a CDRL3 of SEQ ID NO: 2306; (rr) the VH comprises a CDRH1 of SEQ ID NO: 1626, a CDRH2 of SEQ ID NO: 1627, and a CDRH3 of SEQ ID NO: 1628, and the VL comprises a CDRL1 of SEQ ID NO: 2313, a CDRL2 of SEQ ID NO: 2314, and a CDRL3 of SEQ ID NO: 2315; (ss) the VH comprises a CDRH1 of SEQ ID NO: 1629, a CDRH2 of SEQ ID NO: 1630, and a CDRH3 of SEQ ID NO: 1631, and the VL comprises a CDRL1 of SEQ ID NO: 2316, a CDRL2 of SEQ ID NO: 2317, and a CDRL3 of SEQ ID NO: 2318; (tt) the VH comprises a CDRH1 of SEQ ID NO: 1632, a CDRH2 of SEQ ID NO: 1633, and a CDRH3 of SEQ ID NO: 1634, and the VL comprises a CDRL1 of SEQ ID NO: 2319, a CDRL2 of SEQ ID NO: 2320, and a CDRL3 of SEQ ID NO: 2321; (uu) the VH comprises a CDRH1 of SEQ ID NO: 1635, a CDRH2 of SEQ ID NO: 1636, and a CDRH3 of SEQ ID NO: 1637, and the VL comprises a CDRL1 of SEQ ID NO: 2322, a CDRL2 of SEQ ID NO: 2323, and a CDRL3 of SEQ ID NO: 2324; (vv) the VH comprises a CDRH1 of SEQ ID NO: 1638, a CDRH2 of SEQ ID NO: 1639, and a CDRH3 of SEQ ID NO: 1640, and the VL comprises a CDRL1 of SEQ ID NO: 2325, a CDRL2 of SEQ ID NO: 2326, and a CDRL3 of SEQ ID NO: 2327; (ww) the VH comprises a CDRH1 of SEQ ID NO: 1641, a CDRH2 of SEQ ID NO: 1642, and a CDRH3 of SEQ ID NO: 1643, and the VL comprises a CDRL1 of SEQ ID NO: 2328, a CDRL2 of SEQ ID NO: 2329, and a CDRL3 of SEQ ID NO: 2330; (xx) the VH comprises a CDRH1 of SEQ ID NO: 1644, a CDRH2 of SEQ ID NO: 1645, and a CDRH3 of SEQ ID NO: 1646, and the VL comprises a CDRL1 of SEQ ID NO: 2331, a CDRL2 of SEQ ID NO: 2332, and a CDRL3 of SEQ ID NO: 2333; (yy) the VH comprises a CDRH1 of SEQ ID NO: 1647, a CDRH2 of SEQ ID NO: 1648, and a CDRH3 of SEQ ID NO: 1649, and the VL comprises a CDRL1 of SEQ ID NO: 2334, a CDRL2 of SEQ ID NO: 2335, and a CDRL3 of SEQ ID NO: 2336; (zz) the VH comprises a CDRH1 of SEQ ID NO: 1650, a CDRH2 of SEQ ID NO: 1651, and a CDRH3 of SEQ ID NO: 1652, and the VL comprises a CDRL1 of SEQ ID NO: 2337, a CDRL2 of SEQ ID NO: 2338, and a CDRL3 of SEQ ID NO: 2339; (aaa) the VH comprises a CDRH1 of SEQ ID NO: 1653, a CDRH2 of SEQ ID NO: 1654, and a CDRH3 of SEQ ID NO: 1655, and the VL comprises a CDRL1 of SEQ ID NO: 2340, a CDRL2 of SEQ ID NO: 2341, and a CDRL3 of SEQ ID NO: 2342; (bbb) the VH comprises a CDRH1 of SEQ ID NO: 1656, a CDRH2 of SEQ ID NO: 1657, and a CDRH3 of SEQ ID NO: 1658, and the VL comprises a CDRL1 of SEQ ID NO: 2343, a CDRL2 of SEQ ID NO: 2344, and a CDRL3 of SEQ ID NO: 2345; or (ccc) the VH comprises a CDRH1 of SEQ ID NO: 1659, a CDRH2 of SEQ ID NO: 1660, and a CDRH3 of SEQ ID NO: 1661, and the VL comprises a CDRL1 of SEQ ID NO: 2346, a CDRL2 of SEQ ID NO: 2347, and a CDRL3 of SEQ ID NO: 2348.

[0036] In some embodiments of the aforementioned genetically engineered NK cell, the second antigen recognition domain comprises a scFv comprising a VH and a VL, wherein (a) the VH comprises SEQ ID NO: 82 and the VL comprises SEQ ID NO: 84; (b) the VH comprises SEQ ID NO: 21 and the VL comprises SEQ ID NO: 23; (c) the VH comprises SEQ ID NO: 31 and the VL comprises SEQ ID NO: 33; (d) the VH comprises SEQ ID NO: 41 and the VL comprises SEQ ID NO: 43; (e) the VH comprises SEQ ID NO: 51 and the VL comprises SEQ ID NO: 53; (f) the VH comprises SEQ ID NO: 61 and the VL comprises SEQ ID NO: 63; (g) the VH comprises SEQ ID NO: 693 and the VL comprises SEQ ID NO: 66; (h) the VH comprises SEQ ID NO: 694 and the VL comprises SEQ ID NO: 69; (i) the VH comprises SEQ ID NO: 695 and the VL comprises SEQ ID NO: 72; (j) the VH comprises SEQ ID NO: 74 and the VL comprises SEQ ID NO: 76; (k) the VH comprises SEQ ID NO: 78 and the VL comprises SEQ ID NO: 80; (1) the VH comprises SEQ ID NO: 11 and the VL comprises SEQ ID NO: 13; (m) the VH comprises SEQ ID NO: 92 and the VL comprises SEQ ID NO: 94; (n) the VH comprises SEQ ID NO: 102 and the VL comprises SEQ ID NO: 103; (o) the VH comprises SEQ ID NO: 104 and the VL comprises SEQ ID NO: 105; (p) the VH comprises SEQ ID NO: 712 and the VL comprises SEQ ID NO: 713; (q) the VH comprises SEQ ID NO: 714 and the VL comprises SEQ ID NO: 715; (r) the VH comprises SEQ ID NO: 716 and the VL comprises SEQ ID NO: 717; (s) the VH comprises SEQ ID NO: 718 and the VL comprises SEQ ID NO: 719; (t) the VH comprises SEQ ID NO: 720 and the VL comprises SEQ ID NO: 721; (u) the VH comprises SEQ ID NO: 722 and the VL comprises SEQ ID NO: 723; (v) the VH comprises SEQ ID NO: 724 and the VL comprises SEQ ID NO: 725; (w) the VH comprises SEQ ID NO: 948 and the VL comprises SEQ ID NO: 949; (x) the VH comprises SEQ ID NO: 950 and the VL comprises SEQ ID NO: 951; (y) the VH comprises SEQ ID NO: 952 and the VL comprises SEQ ID NO: 953; (z) the VH comprises SEQ ID NO: 954 and the VL comprises SEQ ID NO: 955; (aa) the VH comprises SEQ ID NO: 958 and the VL comprises SEQ ID NO: 959; (bb) the VH comprises SEQ ID NO: 960 and the VL comprises SEQ ID NO: 961; (cc) the VH comprises SEQ ID NO: 964 and the VL comprises SEQ ID NO: 965; (dd) the VH comprises SEQ ID NO: 966 and the VL comprises SEQ ID NO: 967; (ee) the VH comprises SEQ ID NO: 968 and the VL comprises SEQ ID NO: 969; (ff) the VH comprises SEQ ID NO: 970 and the VL comprises SEQ ID NO: 971; (gg) the VH comprises SEQ ID NO: 972 and the VL comprises SEQ ID NO: 973; (hh) the VH comprises SEQ ID NO: 974 and the VL comprises SEQ ID NO: 975; (ii) the VH comprises SEQ ID NO: 976 and the VL comprises SEQ ID NO: 977; (jj) the VH comprises SEQ ID NO: 980 and the VL comprises SEQ ID NO: 981; (kk) the VH comprises SEQ ID NO: 982 and the VL comprises SEQ ID NO: 983; (11) the VH comprises SEQ ID NO: 984 and the VL comprises SEQ ID NO: 985; (mm) the VH comprises SEQ ID NO: 990 and the VL comprises SEQ ID NO: 991; (nn) the VH comprises SEQ ID NO: 992 and the VL comprises SEQ ID NO: 993; (oo) the VH comprises SEQ ID NO: 994 and the VL comprises SEQ ID NO: 995; (pp) the VH comprises SEQ ID NO: 996 and the VL comprises SEQ ID NO: 997; (qq) the VH comprises SEQ ID NO: 998 and the VL comprises SEQ ID NO: 999; (rr) the VH comprises SEQ ID NO: 1000 and the VL comprises SEQ ID NO: 1001; (ss) the VH comprises SEQ ID NO: 1002 and the VL comprises SEQ ID NO: 1003; (tt) the VH comprises SEQ ID NO: 1004 and the VL comprises SEQ ID NO: 1005; (uu) the VH comprises SEQ ID NO: 1006 and the VL comprises SEQ ID NO: 1007; (vv) the VH comprises SEQ ID NO: 1008 and the VL comprises SEQ ID NO: 1009; (ww) the VH comprises SEQ ID NO: 1010 and the VL comprises SEQ ID NO: 1011; (xx) the VH comprises SEQ ID NO: 1016 and the VL comprises SEQ ID NO: 1017; (yy) the VH comprises SEQ ID NO: 1018 and the VL comprises SEQ ID NO: 1019; (zz) the VH comprises SEQ ID NO: 1020 and the VL comprises SEQ ID NO: 1021; (aaa) the VH comprises SEQ ID NO: 1022 and the VL comprises SEQ ID NO: 1023; (bbb) the VH comprises SEQ ID NO: 1024 and the VL comprises SEQ ID NO: 1025; (ccc) the VH comprises SEQ ID NO: 1026 and the VL comprises SEQ ID NO: 1027; (ddd) the VH comprises SEQ ID NO: 1028 and the VL comprises SEQ ID NO: 1029; (eee) the VH comprises SEQ ID NO: 1030 and the VL comprises SEQ ID NO: 1031; (fff) the VH comprises SEQ ID NO: 1032 and the VL comprises SEQ ID NO: 1033; (ggg) the VH comprises SEQ ID NO: 1034 and the VL comprises SEQ ID NO: 1035; (hhh) the VH comprises SEQ ID NO: 1036 and the VL comprises SEQ ID NO: 1037; or (iii) the VH comprises SEQ ID NO: 1038 and the VL comprises SEQ ID NO: 1039.

[0037] In some embodiments, the second antigen recognition domain comprises a single domain antibody fragment, an adnectin peptide, an affibody, an afflilin, an affimer, an affitin, an alphabody, an anticalin, an avimer, a DARPin (Designed Ankyrin Repeat Protein), a Fynomer, a Kunitz domain peptide, a monobody, a centyrin, an aptamer, a T cell receptor (TCR)-like antibody, a single chain TCR (scTCR), or a portion of any of the foregoing.

[0038] In some embodiments, the second antigen recognition domain comprises a human CD27 extracellular domain. In some embodiments, the extracellular domain comprises a hinge.

[0039] In some embodiments of the aforementioned genetically engineered NK cell, the transmembrane domain comprises a CD8, CD16, CD27, CD28, NKG2D, NKp44, NKp46, NKp30, NKp80, DNAM-1, CD3 zeta, CD3 epsilon, CD3 gamma, CD3 delta, CD45, CD4, CD5, CD9, CD22, CD33, CD37, CD64, CD80, CD86, CD134, CD137, CD154, ICOS/CD278, GITR/CD357, DAP10, DAP12 or erythropoietin receptor transmembrane domain, a portion of any of the foregoing, or a combination of any of the foregoing.

[0040] In some embodiments, the intracellular domain comprises one or more costimulatory domain(s). In certain embodiments, the one or more costimulatory domain(s) are selected from the group consisting of: a CD28 costimulatory domain, a 4-1BB costimulatory domain, a DAP10 costimulatory domain, a DAP12 costimulatory domain, a 2B4 costimulatory domain, a OX40 costimulatory domain, an OX40L costimulatory domain, a ICOS costimulatory domain, or a CD27 costimulatory domain, or a portion of any of the foregoing.

[0041] In some embodiments, the intracellular domain comprises an activation domain. In certain embodiments, the activation domain comprises a DAP12, FCER1G, FCGR2A, or CD3zeta intracellular signaling domain, or a portion of any of the foregoing.

[0042] In some embodiments, the genetically engineered NK cell comprises a CAR and/or a polynucleotide encoding the CAR, wherein the CAR comprises an amino acid an amino acid sequence that is at least 90%, at least 91%, at least 92%, at least 93%, at least 94%, at least 95%, at least 96%, at least 97%, at least 98%, at least 99% or at least 100% identical to the amino acid sequence of SEQ ID NO: 637, 639, 641, 643, 645, 647, 700, 2561-2593, 2697-2736 or 2737-2882.

[0043] In some embodiments, the aforementioned genetically engineered NK cell further comprises at least one exogenous polypeptide. In certain embodiments, the at least one exogenous polypeptide comprises a cytokine, chemokine, ligand, receptor, monoclonal antibody, bispecific T cell engager, peptide or enzyme, a subunit or a portion of the foregoing, or any combination of the foregoing. In particular, the at least one exogenous polypeptide comprises a cytokine, wherein the cytokine comprises IL-15, membrane-bound IL-15 (mbIL-15), IL-2, membrane-bound IL-2, IL-12, membrane-bound IL-12, IL-18, membrane-bound IL-18, IL-21, membrane-bound IL-21, p40, LIGHT, CD40L, FLT3L, 4-1BBL, or FASL. In some embodiments, the at least one exogenous polypeptide comprises IL-15RA, IL-15, or is a fusion protein comprising IL-15 and IL-15RA. In some embodiments, the at least one exogenous polypeptide is a tethered IL-21, a tethered IL-12, or a tethered IL-18.

[0044] In some embodiments, the genetically engineered NK cell further comprises a first exogenous polypeptide comprising mbIL-15 and a second exogenous polypeptide comprising IL-15RA.

[0045] In some embodiments, the at least one exogenous polypeptide comprises a receptor selected from the group consisting of: CSF-1R, a CXC chemokine receptor, a CC chemokine receptor, a CX3C chemokine receptor, a XC chemokine receptor, or a chemokine-binding fragment thereof.

[0046] In some embodiments, the at least one exogenous polypeptide is a protein that overcomes immunosuppression of the tumor microenvironment. In certain embodiments, the protein comprises a TGFbeta signal converter. In particular, the TGFbeta signal converter comprises a TGFbeta receptor extracellular domain and an NK cell intracellular domain. In other embodiments, the protein comprises a TGFbeta decoy receptor comprising a TGFbeta receptor extracellular domain and optionally, a transmembrane domain. In certain embodiments, the transmembrane domain is a transmembrane domain from a protein that is not a TGFbeta receptor. Alternatively, the transmembrane domain is a transmembrane domain from the TGFbeta receptor.

[0047] In some embodiments, the at least one exogenous polypeptide comprises a CAR comprising at least one antigen recognition domain that specifically binds an antigen other than human CD70. In certain embodiments, the antigen other than human CD70 is selected from the group consisting of: CAIX, CD19, CD20, CD22, CD33, CD37, CD79a, CD79b, CD96, CD123, CD138, CLL-1, CXCR5, BCMA, FOLR2, FCRL5, FLT3, GPRC5D, HAVCR1, Her2, mesothelin, MUC16, EGFR, EGFRVIII, IL13Ra2, Trop2, GPC3, FOLR1, or GD2. In some embodiments, the at least one exogenous polypeptide comprises a safety switch protein.

[0048] In some embodiments, the genetically engineered NK cell comprises at least one exogenous polypeptide linked to the genetically engineered NK cell by chemical conjugation or by a sortase-mediated transpeptidation reaction.

[0049] In some embodiments, the genetically engineered NK has a reduced likelihood of fratricide by a NK cell expressing an anti-CD70 CAR compared to the likelihood of fratricide of a wild-type NK cell.

[0050] In some embodiments, the genetically engineered NK cell exhibits greater fold cell expansion than a wildtype NK cell.

[0051] Further provided herein is a population of cells, wherein at least about 30% of cells in the population are the genetically engineered NK cell described hereinabove.

[0052] Also provided herein is a pharmaceutical composition comprising the aforementioned genetically engineered NK cell or the aforementioned population of cells, and a pharmaceutically acceptable carrier, diluent, or excipient.

[0053] Further provided herein is a method for treating a cancer in a subject by administering to the subject an effective amount of the aforementioned population of cells or the aforementioned pharmaceutical composition.

[0054] In some embodiments, the cancer is a CD70-positive cancer. In certain embodiments, the cancer is a solid tumor. In particular, the cancer is selected from the group consisting of: renal cancer (e.g., renal clear cell carcinoma, renal non-clear cell carcinoma), lung cancer, pleural mesothelioma, colorectal cancer, ovarian cancer, breast cancer, head and neck cancer (e.g., head and neck squamous cell carcinoma), esophageal squamous cell carcinoma, melanoma, pancreatic cancer, gastric cancer, cervical cancer (e.g., cervical squamous cell carcinoma), esophageal cancer, lung cancer, sarcoma, seminoma, non-seminomatous germ cell tumor, and glioblastoma. In other embodiments, the cancer is a hematologic malignancy. In particular, the hematologic malignancy is acute myeloid leukemia (AML), non-Hodgkin's lymphoma (e.g., diffuse large B cell lymphoma (DLBCL), mantle cell lymphoma (MCL)), acute lymphoblastic leukemia, peripheral T cell lymphoma (PTCL), anaplastic large cell lymphoma (ALCL), myelodysplastic syndrome (MDS), multiple myeloma, Waldenstrom's macroglobulinemia, mature B cell neoplasms, or chronic lymphocytic leukemia (CLL).

[0055] In some embodiments, the method for treating a cancer further comprises administering an additional therapeutic agent.

### BRIEF DESCRIPTION OF THE DRAWINGS

[0056] FIG. 1 is a schematic diagram of exemplary chimeric antigen receptors of the disclosure that specifically bind to CD70. Signal Seq represents signal peptide sequence. Signal Seq represents signal peptide sequence. TM represents transmembrane sequence. Costim 1 and Costim 2 represent costimulatory domain sequences. Signaling represents activation domain sequences.

[0057] FIG. 2 is a schematic diagram of exemplary constructs of the disclosure that encode a membrane bound IL-12 polypeptide.

[0058] FIG. 3 is a schematic diagram of exemplary constructs of the disclosure that encode a soluble or secreted IL-15 and/or IL15Ra.

[0059] FIGS. 4A-FIG. 4D are schematic diagrams of exemplary constructs of the disclosure that encode a CAR and an shRNA. FIG. 4A shows a MND promoter or EF1a promoter regulated CAR located upstream of a U6 promoter regulated shRNA. Transcription may occur through the MND/EF1a promoter and the U6 promoters in the same direction or in the opposite direction. FIG. 4B shows a MND promoter or EF1a promoter regulated CAR located downstream of a U6 promoter regulated shRNA. Transcription may occur through the MND/EF1a promoter and the U6 promoters in the same direction or in the opposite direction. FIG. 4C shows a MND promoter or EF1a promoter regulated CAR and cytokine element(s), located upstream of a U6 promoter regulated shRNA. Transcription may occur through the MND/EF1a promoter and the U6 promoters in the same direction or in the opposite direction. FIG. 4D shows a MND promoter or EF1a promoter regulated CAR and cytokine element(s), located downstream of a U6 promoter regulated shRNA. Transcription may occur through the MND/EF1a promoter and the U6 promoters in the same direction or in the opposite direction.

[0060] FIG. 5 depicts a wild type TcBuster transposase amino acid sequence, highlighting amino acids that may be points of contact with DNA. Large bold lettering indicates catalytic triad amino acids; lettering with boxes indicates amino acids that when substituted to a positive charged amino acid increases transposition; italicized and lowercased lettering indicates positive charged amino acids that when substituted to a different amino acid decreases transposition; bold italicized and underlined indicates amino acids that when substituted to a positive charged amino acid increases transposition, and when substituted to a negative charged amino acid decreases transposition; underlined lettering indicates amino acids that could be positive charged amino acids based on protein sequence alignment to the Buster subfamily.

[0061] FIG. 6 is a series of histograms depicting that CD70 expression increases upon activation of peripheral blood NK cells with K562-4-1BBL-mbIL-21 Feeder Cells.

[0062] FIG. 7 is a series of flow cytometry scatterplots showing that CD70 is efficiently knocked out from peripheral blood NK cells.

[0063] FIG. 8A-FIG. 8C is a series of graphs showing transduction and expansion of CAR-NK. FIG. 8A shows that the percentage of live NK cells expressing the CD70-targeting CARs Construct #1 (an exemplary CD27 CAR of SEQ ID NO: 643) and Construct #2 (an exemplary ScFv specific for CD70 of SEQ ID NO: 2565), or GFP are similar in CD70WT NK and CD70 KO NK cells. FIG. 8B shows that cell counts of CD70 wild-type (WT) NK engineered to express CD70 targeting Construct #1 or Construct #2 CARs were significantly lower than those of CD70 KO NK cells expressing CD70 targeting Construct #1 or Construct #2 CARs. As a control, NK cells engineered to express a GFP had similar cell counts in CD70 WT and CD70 NK cells. FIG. 8C shows the viability of CD70 WT NK engineered to express the CD70 targeting CARs, Construct #1 or Construct #2 CARs were less than 25% viable while viability remained above 80% in CD70 KO NK cells engineered to express CD70 targeting CARs, Construct #1 and Construct #2. CD70 WT NK cells engineered to express a GFP control were 58% viable, while CD70 KO NK cells engineered to express a GFP control were 90 percent viable.

[0064] FIG. 9A and FIG. 9B is a series of graphs showing CD70 CAR mediated fratricide of autologous CD70 wild-type NK cells. FIG. 9A shows #CTV+ cells/#target cells only for autologous CTV+CD70 WT NK cells at various E/T ratios (4:1, 2:1, 1:1, or 0.5:1). FIG. 9B shows #CTV+ cells/#target cells only for autologous CTV+CD70 KO NK cells at various E/T ratios (4:1, 2:1, 1:1, or 0.5:1).

[0065] FIG. 10 shows CD70 CAR mediated killing of MOLM-13 cell line. CD70 KO NK cells engineered to express CD70 targeting CARs, Construct #1 and Construct #2, demonstrate specific killing of MOLM-13 target cells expressing WT CD70, but do not demonstrate specific killing of MOLM-13 CD70 KO target cells.

[0066] FIG. 11 is a graph showing that anti-CD70 CAR transduction and CD70 expression were inversely correlated. Peripheral blood natural killer (PBNK) cells were transduced with increasing concentrations of virus to express an anti-CD70 CAR comprising a CD27 extracellular domain (“anti-CD70 CAR (CD27 receptor)”) and the percentage of CAR-positive cells (circles) and CD70-positive cells (squares) four days post-transduction is shown. As control, PBNKs were transduced with increasing concentrations of virus to express ZsGreen fluorescent protein (“ZsGreen”) and the percentage of CD70-positive cells (triangles) at four days post-transduction is shown.

### DETAILED DESCRIPTION

[0067] The present disclosure overcomes problems associated with current technologies by providing NK cells and antigen-specific NK cells for immunotherapy, such as for the treatment of immune-related diseases, including cancer and autoimmune disorders, as well as infection including but not limited to viruses, such as CMV, EBV, and HIV. The present disclosure is based, at least in part, on the discovery that while CD70 is not expressed in resting peripheral blood NK cells, the protein is upregulated in response to NK cell activation. The upregulation of CD70 following activation is detrimental to the culture of NK cells genetically modified to express chimeric antigen receptors (CARs) that specifically bind to CD70 as it may result in fratricide. Accordingly, the present disclosure provides fratricide-resistant NK cells and methods of generating the cells by, e.g., contacting the cells with at least one CD70 inhibitor. Such cells can efficiently target and kill cells expressing CD70 without incurring significant NK cell fratricide during culture. In some embodiments, the NK cells disclosed herein may comprise reduced levels of CD70 (e.g., protein and/or mRNA) and/or exhibit reduced CD70 activity. In some embodiments, this reduction of CD70 levels and/or CD70 activity is achieved by contacting NK cells with at least one CD70 inhibitor. In addition, the present disclosure is also based, at least in part, on the discovery that contacting an NK cell or a population of NK cells with a CD70 inhibitor results in enhanced expansion capability as compared to an NK cell or a population of NK cells that has not been contacted with a CD70 inhibitor. Increasing cell expansion is desirable to improve the production of NK cells for therapeutic applications. Accordingly, methods of making populations of NK cells are also provided.

[0068] The methods described herein can result in an increase in the expansion (e.g., fold-expansion) of an NK cell or population of NK cells (e.g., about a 1-fold to about 500-fold, about a 1-told to about a 450-fold, about a 1-fold to about a 400-fold, about a 1-fold to about a 350-fold, about a 1-fold to about a 300-fold, about a 1-fold to about a 250-fold, about a 1-fold to about a 200-fold, about a 1-fold to about a 180-fold, about a 1-fold to about a 160-fold, about a 1-fold to about a 140-fold, about a 1-fold to about a 120-fold, about a 1-fold to about a 100-fold, about a 1-fold to about a 80-fold, about a 1-fold to about a 60-fold, about a 1-fold to about a 50-fold, about a 1-fold to about a 40-fold, about a 1-fold to about a 30-fold, about 1-fold to about a 25-fold, about a 1-fold- to about a 20-fold, about a 1-fold to about a 15-fold, about a 1-fold to about to about a 10-fold, about a 1-fold to about a 5-fold, about a 5-fold to about 500-fold, about a 5-told to about a 450-fold, about a 5-fold to about a 400-fold, about a 5-fold to about a 350-fold, about a 5-fold to about a 300-fold, about a 5-fold to about a 250-fold, about a 5-fold to about a 200-fold, about a 5-fold to about a 180-fold, about a 5-fold to about a 160-fold, about a 5-fold to about a 140-fold, about a 5-fold to about a 120-fold, about a 5-fold to about a 100-fold, about a 5-fold to about a 80-fold, about a 5-fold to about a 60-fold, about a 5-fold to about a 50-fold, about a 5-fold to about a 40-fold, about a 5-fold to about a 30-fold, about 5-fold to about a 25-fold, about a 5-fold- to about a 20-fold, about a 5-fold to about a 15-fold, about a 5-fold to about to about a 10-fold, about a 10-fold to about 500-fold, about a 10-told to about a 450-fold, about a 10-fold to about a 400-fold, about a 10-fold to about a 350-fold, about a 10-fold to about a 300-fold, about a 10-fold to about a 250-fold, about a 10-fold to about a 200-fold, about a 10-fold to about a 180-fold, about a 10-fold to about a 160-fold, about a 10-fold to about a 140-fold, about a 10-fold to about a 120-fold, about a 10-fold to about a 100-fold, about a 10-fold to about a 80-fold, about a 10-fold to about a 60-fold, about a 10-fold to about a 50-fold, about a 10-fold to about a 40-fold, about a 10-fold to about a 30-fold, about 10-fold to about a 25-fold, about a 10-fold- to about a 20-fold, about a 10-fold to about a 15-fold, about a 15-fold to about 500-fold, about a 15-told to about a 450-fold, about a 15-fold to about a 400-fold, about a 15-fold to about a 350-fold, about a 15-fold to about a 300-fold, about a 15-fold to about a 250-fold, about a 15-fold to about a 200-fold, about a 15-fold to about a 180-fold, about a 15-fold to about a 160-fold, about a 15-fold to about a 140-fold, about a 15-fold to about a 120-fold, about a 15-fold to about a 100-fold, about a 15-fold to about a 80-fold, about a 15-fold to about a 60-fold, about a 15-fold to about a 50-fold, about a 15-fold to about a 40-fold, about a 15-fold to about a 30-fold, about 15-fold to about a 25-fold, about a 15-fold- to about a 20-fold, about a 20-fold to about 500-fold, about a 20-told to about a 450-fold, about a 20-fold to about a 400-fold, about a 20-fold to about a 350-fold, about a 20-fold to about a 300-fold, about a 20-fold to about a 250-fold, about a 20-fold to about a 200-fold, about a 20-fold to about a 180-fold, about a 20-fold to about a 160-fold, about a 20-fold to about a 140-fold, about a 20-fold to about a 120-fold, about a 20-fold to about a 100-fold, about a 20-fold to about a 80-fold, about a 20-fold to about a 60-fold, about a 20-fold to about a 50-fold, about a 20-fold to about a 40-fold, about a 20-fold to about a 30-fold, about 20-fold to about a 25-fold, about a 25-fold to about 500-fold, about a 25-told to about a 450-fold, about a 25-fold to about a 400-fold, about a 25-fold to about a 350-fold, about a 25-fold to about a 300-fold, about a 25-fold to about a 250-fold, about a 25-fold to about a 200-fold, about a 25-fold to about a 180-fold, about a 25-fold to about a 160-fold, about a 25-fold to about a 140-fold, about a 25-fold to about a 120-fold, about a 25-fold to about a 100-fold, about a 25-fold to about a 80-fold, about a 25-fold to about a 60-fold, about a 25-fold to about a 50-fold, about a 25-fold to about a 40-fold, about a 25-fold to about a 30-fold, about a 30-fold to about 500-fold, about a 30-told to about a 450-fold, about a 30-fold to about a 400-fold, about a 30-fold to about a 350-fold, about a 30-fold to about a 300-fold, about a 30-fold to about a 250-fold, about a 30-fold to about a 200-fold, about a 30-fold to about a 180-fold, about a 30-fold to about a 160-fold, about a 30-fold to about a 140-fold, about a 30-fold to about a 120-fold, about a 30-fold to about a 100-fold, about a 30-fold to about a 80-fold, about a 30-fold to about a 60-fold, about a 30-fold to about a 50-fold, about a 30-fold to about a 40-fold, about a 40-fold to about 500-fold, about a 40-told to about a 450-fold, about a 40-fold to about a 400-fold, about a 40-fold to about a 350-fold, about a 40-fold to about a 300-fold, about a 40-fold to about a 250-fold, about a 40-fold to about a 200-fold, about a 40-fold to about a 180-fold, about a 40-fold to about a 160-fold, about a 40-fold to about a 140-fold, about a 40-fold to about a 120-fold, about a 40-fold to about a 100-fold, about a 40-fold to about a 80-fold, about a 40-fold to about a 60-fold, about a 40-fold to about a 50-fold, about a 50-fold to about 500-fold, about a 50-told to about a 450-fold, about a 50-fold to about a 400-fold, about a 50-fold to about a 350-fold, about a 50-fold to about a 300-fold, about a 50-fold to about a 250-fold, about a 50-fold to about a 200-fold, about a 50-fold to about a 180-fold, about a 50-fold to about a 160-fold, about a 50-fold to about a 140-fold, about a 50-fold to about a 120-fold, about a 50-fold to about a 100-fold, about a 50-fold to about a 80-fold, about a 50-fold to about a 60-fold, about a 60-fold to about 500-fold, about a 60-told to about a 450-fold, about a 60-fold to about a 400-fold, about a 60-fold to about a 350-fold, about a 60-fold to about a 300-fold, about a 60-fold to about a 250-fold, about a 60-fold to about a 200-fold, about a 60-fold to about a 180-fold, about a 60-fold to about a 160-fold, about a 60-fold to about a 140-fold, about a 60-fold to about a 120-fold, about a 60-fold to about a 100-fold, about a 60-fold to about a 80-fold, about a 80-fold to about 500-fold, about a 80-told to about a 450-fold, about a 80-fold to about a 400-fold, about a 80-fold to about a 350-fold, about a 80-fold to about a 300-fold, about a 80-fold to about a 250-fold, about a 80-fold to about a 200-fold, about a 80-fold to about a 180-fold, about a 80-fold to about a 160-fold, about a 80-fold to about a 140-fold, about a 80-fold to about a 120-fold, about a 80-fold to about a 100-fold, about a 100-fold to about 500-fold, about a 100-told to about a 450-fold, about a 100-fold to about a 400-fold, about a 100-fold to about a 350-fold, about a 100-fold to about a 300-fold, about a 100-fold to about a 250-fold, about a 100-fold to about a 200-fold, about a 100-fold to about a 180-fold, about a 100-fold to about a 160-fold, about a 100-fold to about a 140-fold, about a 100-fold to about a 120-fold, about a 120-fold to about 500-fold, about a 120-told to about a 450-fold, about a 120-fold to about a 400-fold, about a 120-fold to about a 350-fold, about a 120-fold to about a 300-fold, about a 120-fold to about a 250-fold, about a 120-fold to about a 200-fold, about a 120-fold to about a 180-fold, about a 120-fold to about a 160-fold, about a 120-fold to about a 140-fold, about a 140-fold to about 500-fold, about a 140-told to about a 450-fold, about a 140-fold to about a 400-fold, about a 140-fold to about a 350-fold, about a 140-fold to about a 300-fold, about a 140-fold to about a 250-fold, about a 140-fold to about a 200-fold, about a 140-fold to about a 180-fold, about a 140-fold to about a 160-fold, about a 160-fold to about 500-fold, about a 160-told to about a 450-fold, about a 160-fold to about a 400-fold, about a 160-fold to about a 350-fold, about a 160-fold to about a 300-fold, about a 160-fold to about a 250-fold, about a 160-fold to about a 200-fold, about a 160-fold to about a 180-fold, about a 180-fold to about 500-fold, about a 180-told to about a 450-fold, about a 180-fold to about a 400-fold, about a 180-fold to about a 350-fold, about a 180-fold to about a 300-fold, about a 180-fold to about a 250-fold, about a 180-fold to about a 200-fold, about a 200-fold to about 500-fold, about a 200-told to about a 450-fold, about a 200-fold to about a 400-fold, about a 200-fold to about a 350-fold, about a 200-fold to about a 300-fold, about a 200-fold to about a 250-fold, about a 250-fold to about 500-fold, about a 250-told to about a 450-fold, about a 250-fold to about a 400-fold, about a 250-fold to about a 350-fold, about a 250-fold to about a 300-fold, about a 300-fold to about 500-fold, about a 300-told to about a 450-fold, about a 300-fold to about a 400-fold, about a 300-fold to about a 350-fold, about a 350-fold to about 500-fold, about a 350-told to about a 450-fold, about a 350-fold to about a 400-fold, about a 400-fold to about 500-fold, about a 400-told to about a 450-fold, or about a 450-fold to about a 500-fold, expansion) as compared to a NK cell or a population of NK cells that is not contacted with the CD70 inhibitor (e.g., a wild-type NK cell or a population of wild-type NK cells).

[0069] In some embodiments, the present disclosure provides NK cells which express one or more chimeric antigen receptors (CARs) that specifically recognize CD70. To enhance signaling, the CAR may be linked to an activation domain. To generate a more potent receptor that functions optimally in NK cells, the receptor may have a costimulatory domain (including but not limited to CD28, 4-1BB, DAP12, DAP10, 2B4, OX40, OX40L, CD27, ICOS or any combination of thereof), as well as a CD3ζ, FCGR2A or FCER1G activation domain. Thus, the present disclosure also provides methods for application of NK cell immunotherapy to target CD70 derived from tumors and pathogens. Further, unlike T cells, NK cells from an allogeneic source carry a lower risk of inducing graft-versus-host disease; thus, the use of allogeneic NK cells with CARs provide a potential source of CAR-engineered NK cells for adoptive therapy.

[0070] Moreover, the present disclosure further provides immune cells, such as NK cells, comprising one or more exogenous polypeptides in addition to the CAR. For example, the cells may comprise at least two antigen receptors, such as a combination of two CARs, for dual targeting of tumors. To allow for the enhanced in vivo persistence of NK cells, the cells may be engineered to express an exogenous polypeptide comprising IL-15, IL-15 and IL-15 receptor alpha (IL-15RA or IL-15Ra) complex or another cytokine such as IL-2, IL-12, IL-21, IL-18, TNFalpha, IFNbeta, LIGHT, CD40L, FLT3L, HVEM, LTa, LTb, VEGFc, or a combination thereof. In some embodiments, the exogenous polypeptide comprises a membrane-bound IL-15, a tethered IL-21, a tethered IL-12, or a tethered IL-18. In some embodiments, the cells may be engineered to express an exogenous polypeptide comprising soluble or secreted IL-15. In some embodiments, the additional exogenous polypeptide comprises IL-15RA or a fusion protein comprising IL-15 and IL-15RA. In some embodiments, the NK cell comprises a first additional exogenous polypeptide and a second additional exogenous polypeptide. In some embodiments, (a) the first additional exogenous polypeptide comprises mbIL-15 and the second additional exogenous polypeptide comprises IL-15RA; or (b) the first additional exogenous polypeptide comprises soluble IL-15 and the second additional exogenous polypeptide comprises IL-15RA.

[0071] To allow for the NK cells to have enhanced ability to overcome the tumor microenvironment in vivo, the NK cells provided herein may be engineered to express a functional effector element such as a TGFβ signal converter, a TGFβ decoy receptor (e.g., a TGFβ dominant negative receptor) or a chemokine receptor. For example, a TGFβ signal converter may comprise a TGFβ receptor extracellular domain with the intracellular domain replaced with an NK cell intracellular domain, thereby converting a negative suppression signal into a NK cell stimulation signal. For example, a TGFβ decoy receptor may comprise a truncated TGFβ receptor that lacks the intracellualar signalling domain, thereby interfering with endogenous TGFβ receptor signalling and preventing TGFβ inhibition of the NK cells. In some embodiments, the TGFβ decoy receptor comprises the extracellular domain of a TGFβ receptor (e.g., the extracellular domain of TGFBR1 or TGFBR2) and the transmembrane domain of a TGFβ receptor (e.g., the transmembrane domain of TGFBR1 or TGFBR2). In some embodiments, a TGFβ decoy receptor comprises the extracellular domain of a TGFβ receptor (e.g., the extracellular domain of TGFBR1 or TGFBR2) and a heterologous transmembrane domain (e.g., any of the transmembrane domains provided herein (e.g., a CD28 transmembrane domain)). For example, the chemokine receptor may be CXCR4. Thus, the genetically engineered NK cells may express one or more CARs that bind to any combination of target antigens and may further express IL-15/IL-15RA complex or other cytokines, a TGFβ signal converter or a chemokine receptor. The NK cells may be derived from several sources including peripheral blood, cord blood, bone marrow, stem cells, induced pluripotent stem cells (iPSC cells), and NK cell lines, such as, but not limited to, the NK-92, NK101, KHYG-1, YT, NK-YS, YTS, HANK-1, NKL, and NK3.3 cell lines.

[0072] While the immune cells of the present disclosure may be targeted to any combination of antigens, exemplary antigens for the CAR include but are not limited to CD70. In particular aspects, the immune cells are dually targeted to an antigen combination including CD70 and CD33 (e.g., for AML), CD70 and CD123 (e.g., for AML), CD70 and CLL1 (e.g., for AML), CD70 and CD96 (e.g., for AML); CD70 and Flt3 (e.g., for AML); CD70 and CD19 (e.g., for B cell malignancies); CD70 and CD22 (e.g., for B cell malignancies); CD70 and CD20 (e.g., for B cell malignancies); CD70 and CD79a (e.g., for B cell malignancies); CD70 and CD79b (e.g., for B cell malignancies); CD70 and FcRH5 (e.g., for B cell malignancies); CD70 and BCMA (e.g., for multiple myeloma); CD70 and GPRC5D (e.g., for multiple myeloma); CD70 and FcRL5 (e.g., for multiple myeloma); CD70 and CD138 (e.g., for multiple myeloma); CD70 and CD96 (e.g., for RCC); CD70 and HAVCR1 (e.g., for RCC); CD70 and EGFR (e.g., for RCC).

[0073] In further embodiments, the NK cells provided herein are genetically modified (e.g., transduced with a vector) to express two CARs. Examples of target antigens include, but are not limited to CD96 and CD33; CD123 and CD33; CD19 and ROR1; CD38 and BCMA; BCMA and GPRC5D; BCMA and CD138; CD19 and CD22, CD79a and CD22; CD37 and CXCR5. These NK cells have dual specificity and may further be engineered to express an exogenous polypeptide comprising IL-15 or another cytokine which enhances the in vivo persistence of the NK-cells (e.g., without additional exogenous cytokine support). In addition, the expression of two CARs provides the NK cells increased specificity by limiting the off-target toxicity of the cells, such that a signal is only provided to the NK cells to kill when the cells contact both antigens expressed on a tumor, as well as enhanced in vivo proliferation and persistence. Thus, normal cells that express only one antigen may not be targeted by the NK cells.

[0074] Genetic reprogramming of immune cells, such as NK cells and T cells, for adoptive cancer immunotherapy has clinically relevant applications and benefits such as 1) innate anti-tumor surveillance without prior need for sensitization 2) allogeneic efficacy without graft versus host reactivity in the case of NK cells and 3) direct cell-mediated cytotoxicity and cytolysis of target tumors. Accordingly, the present disclosure also provides methods for treating immune-related disorders, such as cancer, comprising adoptive cell immunotherapy with any of the engineered immune cells provided herein.

### I. Definitions

[0075] As used herein, “essentially free,” in terms of a specified component, is used herein to mean that none of the specified component has been purposefully formulated into a composition and/or is present only as a contaminant or in trace amounts. The total amount of the specified component resulting from any unintended contamination of a composition is therefore well below 0.05%, preferably below 0.01%. Most preferred is a composition in which no amount of the specified component can be detected with standard analytical methods.

[0076] As used herein in the specification, “a” or “an” may mean one or more. As used herein in the claim(s), when used in conjunction with the word “comprising,” the words “a” or “an” may mean one or more than one.

[0077] As used herein, the term “or” in the claims is used to mean “and/or” unless explicitly indicated to refer to alternatives only or the alternatives are mutually exclusive, although the disclosure supports a definition that refers to only alternatives and “and/or.” As used herein “another” or “additional” may mean at least a second or more.

[0078] As used herein, the term “about” is used to indicate that a value includes the inherent variation of error for the device, the method being employed to determine the value, or the variation that exists among the study subjects.

[0079] As used herein, the term “portion” when used in reference to a polypeptide or a peptide refers to a fragment of the polypeptide or peptide. In some embodiments, a “portion” of a polypeptide or peptide retains at least one function and/or activity of the full-length polypeptide or peptide from which it was derived. For example, in some embodiments, if a full-length polypeptide binds a given ligand, a portion of that full-length polypeptide also binds to the same ligand.

[0080] The terms “protein” and “polypeptide” are used interchangeably herein.

[0081] The term “exogenous,” when used in relation to a protein, gene, nucleic acid, or polynucleotide in a cell or organism refers to a protein, gene, nucleic acid, or polynucleotide that has been introduced into the cell or organism by artificial or natural means; or in relation to a cell, the term refers to a cell that was isolated and subsequently introduced into a cell population or to an organism by artificial or natural means. An exogenous nucleic acid may be from a different organism or cell, or it may be one or more additional copies of a nucleic acid that occurs naturally within the organism or cell. An exogenous cell may be from a different organism, or it may be from the same organism. By way of a non-limiting example, an exogenous nucleic acid is one that is in a chromosomal location different from where it would be in natural cells, or is otherwise flanked by a different nucleic acid sequence than that found in nature. The term “exogenous” is used interchangeably with the term “heterologous”.

[0082] By “expression construct” or “expression cassette” is used to mean a nucleic acid molecule that is capable of directing transcription. An expression construct includes, at a minimum, one or more transcriptional control elements (such as promoters, enhancers or a structure functionally equivalent thereof) that direct gene expression in one or more desired cell types, tissues or organs. Additional elements, such as a transcription termination signal, may also be included.

[0083] A “vector” or “construct” (sometimes referred to as a gene delivery system or gene transfer “vehicle”) refers to a macromolecule or complex of molecules comprising a polynucleotide, or the protein expressed by said polynucleotide, to be delivered to a host cell, either in vitro or in vivo.

[0084] A “plasmid,” a common type of a vector, is an extra-chromosomal DNA molecule separate from the chromosomal DNA that is capable of replicating independently of the chromosomal DNA. In certain cases, it is circular and double-stranded.

[0085] A “gene,” “polynucleotide,” “coding region,” “sequence,” “segment,” “fragment,” or “transgene” that “encodes” a particular protein, is a section of a nucleic acid molecule that is transcribed and optionally also translated into a gene product, e.g., a polypeptide, in vitro or in vivo when placed under the control of appropriate regulatory sequences. The coding region may be present in either a cDNA, genomic DNA, or RNA form. When present in a DNA form, the nucleic acid molecule may be single-stranded (i.e., the sense strand) or double-stranded. The boundaries of a coding region are determined by a start codon at the 5′ (amino) terminus and a translation stop codon at the 3′ (carboxy) terminus. A gene can include, but is not limited to, cDNA from prokaryotic or eukaryotic mRNA, genomic DNA sequences from prokaryotic or eukaryotic DNA, and synthetic DNA sequences. A transcription termination sequence will usually be located 3′ to the gene sequence.

[0086] The term “control elements” refers collectively to promoter regions, polyadenylation signals, transcription termination sequences, upstream regulatory domains, origins of replication, internal ribosome entry sites (IRES), enhancers, splice junctions, and the like, which collectively provide for the replication, transcription, post-transcriptional processing, and translation of a coding sequence in a recipient cell. Not all of these control elements need be present so long as the selected coding sequence is capable of being replicated, transcribed, and translated in an appropriate host cell.

[0087] The term “promoter” is used herein to refer to a nucleotide region comprising a DNA regulatory sequence, wherein the regulatory sequence is derived from a gene that is capable of binding to a RNA polymerase and allowing for the initiation of transcription of a downstream (3′ direction) coding sequence. It may contain genetic elements at which regulatory proteins and molecules may bind, such as RNA polymerase and other transcription factors, to initiate the specific transcription of a nucleic acid sequence. The phrases “operatively positioned,” “operatively linked,” “under control,” and “under transcriptional control” mean that a promoter is in a correct functional location and/or orientation in relation to a nucleic acid sequence to control transcriptional initiation and/or expression of that sequence.

[0088] By “enhancer” is meant a nucleic acid sequence that, when positioned proximate to a promoter, confers increased transcription activity relative to the transcription activity resulting from the promoter in the absence of the enhancer domain.

[0089] By “operably linked” with reference to nucleic acid molecules is meant that two or more nucleic acid molecules (e.g., a nucleic acid molecule to be transcribed, a promoter, and a functional effector element) are connected in such a way as to permit transcription of the nucleic acid molecule.

[0090] The term “homology” refers to the percent of identity between the nucleic acid residues of two polynucleotides or the amino acid residues of two polypeptides. The correspondence between one sequence and another can be determined by techniques known in the art. For example, homology can be determined by a direct comparison of the sequence information between two polypeptides by aligning the sequence information and using readily available computer programs. Two polynucleotide (e.g., DNA) or two polypeptide sequences are “substantially homologous” to each other when at least about 80%, preferably at least about 90%, and most preferably at least about 95% of the nucleotides, or amino acids, respectively match over a defined length of the molecules, as determined using the methods above.

[0091] The term “stem cell” refers herein to a cell that under suitable conditions is capable of differentiating into a diverse range of specialized cell types, while under other suitable conditions is capable of self-renewing and remaining in an essentially undifferentiated pluripotent state. The term “stem cell” also encompasses a pluripotent cell, multipotent cell, precursor cell, and progenitor cell. Exemplary human stem cells can be obtained from hematopoietic or mesenchymal stem cells obtained from bone marrow tissue, embryonic stem cells obtained from embryonic tissue, or embryonic germ cells obtained from genital tissue of a fetus. Exemplary pluripotent stem cells can also be produced from somatic cells by reprogramming them to a pluripotent state by the expression of certain transcription factors associated with pluripotency; these cells are called “induced pluripotent stem cells” or “iPScs,” “iPSCs,” or “iPS cells.”

[0092] An “embryonic stem (ES) cell” is an undifferentiated pluripotent cell which is obtained from an embryo in an early stage, such as the inner cell mass at the blastocyst stage, or produced by artificial means (e.g., nuclear transfer) and can give rise to any differentiated cell type in an embryo or an adult, including germ cells (e.g., sperm and eggs).

[0093] “Induced pluripotent stem cells” (“iPScs,” “iPSCs” or “iPS cells”) are cells generated by reprogramming a somatic cell by expressing or inducing expression of a combination of factors (herein referred to as reprogramming factors). iPS cells can be generated using fetal, postnatal, newborn, juvenile, or adult somatic cells. In certain embodiments, factors that can be used to reprogram somatic cells to pluripotent stem cells include, for example, Oct4 (sometimes referred to as Oct 3/4), Sox2, c-Myc, Klf4, Nanog, and Lin28. In some embodiments, somatic cells are reprogrammed by expressing at least two reprogramming factors, at least three reprogramming factors, at least four reprogramming factors, at least five reprogramming factors, at least six reprogramming factors, or at least seven reprogramming factors to reprogram a somatic cell to a pluripotent stem cell.

[0094] “Hematopoietic progenitor cells” or “hematopoietic precursor cells” refers to cells which are committed to a hematopoietic lineage but are capable of further hematopoietic differentiation and include hematopoietic stem cells, multipotential hematopoietic stem cells, common myeloid progenitors, megakaryocyte progenitors, erythrocyte progenitors, and lymphoid progenitors. Hematopoietic stem cells (HSCs) are multipotent stem cells that give rise to all the blood cell types including myeloid (monocytes and macrophages, granulocytes (neutrophils, basophils, eosinophils, and mast cells), erythrocytes, megakaryocytes/platelets, dendritic cells), and lymphoid lineages (T cells, B cells, NK cells).

[0095] A “multilymphoid progenitor” (MLP) is defined to describe any progenitor that gives rise to all lymphoid lineages (B, T, and NK cells), but that may or may not have other (myeloid) potentials and is CD45RA⁺, /CD10⁺/CD7\ Any B, T, and NK progenitor can be referred to as an MLP. A “common myeloid progenitor” (CMP) refers to CD45RA⁻/CD135⁺/CD10⁻/CD7⁻ cells that can give rise to granulocytes, monocytes, megakaryocytes, and erythrocytes.

[0096] “Pluripotent stem cell” refers to a stem cell that has the potential to differentiate into all cells constituting one or more tissues or organs, or preferably, any of the three germ layers: endoderm (interior stomach lining, gastrointestinal tract, the lungs), mesoderm (muscle, bone, blood, urogenital), or ectoderm (epidermal tissues and nervous system).

[0097] As used herein, the term “somatic cell” refers to any cell other than germ cells, such as an egg, a sperm, or the like, which does not directly transfer its DNA to the next generation. Typically, somatic cells have limited or no pluripotency. Somatic cells used herein may be naturally-occurring or genetically modified.

[0098] “Programming” is a process that alters the type of progeny a cell can produce. For example, a cell has been programmed when it has been altered so that it can form progeny of at least one new cell type, either in culture or in vivo, as compared to what it would have been able to form under the same conditions without programming. This means that after sufficient proliferation, a measurable proportion of progeny having phenotypic characteristics of the new cell type are observed, if essentially no such progeny could form before programming; alternatively, the proportion having characteristics of the new cell type is measurably more than before programming. This process includes differentiation, dedifferentiation and transdifferentiation.

[0099] “Differentiation” is the process by which a less specialized cell becomes a more specialized cell type. “Dedifferentiation” is a cellular process in which a partially or terminally differentiated cell reverts to an earlier developmental stage, such as pluripotency or multipotency. “Transdifferentiation” is a process of transforming one differentiated cell type into another differentiated cell type. Typically, transdifferentiation by programming occurs without the cells passing through an intermediate pluripotency stage—i.e., the cells are programmed directly from one differentiated cell type to another differentiated cell type. Under certain conditions, the proportion of progeny with characteristics of the new cell type may be at least about 1%, 5%, 25% or more in order of increasing preference.

[0100] As used herein, “feeder cells” or “feeders” are terms describing cells of one type that are co-cultured with cells of a second type to provide an environment in which the cells of the second type can grow, expand, or differentiate, as the feeder cells provide stimulation, growth factors and nutrients for the support of the second cell type. Various cell types can be used as feeder cells including, but not limited to, peripheral blood derived cells (e.g., autologous peripheral blood mononuclear cells), transformed leukemia cells (e.g., erythroleukemic cell lines such as the K562 cell line), certain Wilm's tumor cell lines (e.g., HFWT), endometrial tumor cells (HHUA), melanoma cells (e.g., HMV-II), hepatoblastoma cells (e.g., HuH-6), lung small cell carcinoma cells (e.g., Lu-130 and Lu-134-A), neuroblastoma cells (e.g., NB19 and NB69), embryonal carcinoma testis cells (e.g., NEC14), cervical carcinoma cells (TCO-2), neuroblastoma cells (e.g., TNB1), Epstein Barr virus transformed lymphocyte contiuous line (EBV-LCL), CD4+ T cells, T cell lymphoma cell lines (e.g., HUT78), among others. In some embodiments, the feeder cells may be inactivated when being co-cultured with other cells by irradiation or treatment with an anti-mitotic agent such as mitomycin. In some embodiments, the feeder cells comprise a modification to increase expression of one or more factors capable of increasing immune cell activation and/or proliferation, including, e.g., a co-stimulatory molecule such as CD40L, OX40L, CD86, CD137L, CD80 or CD83, a cytokine such as IL-21, IL-15, membrane-bound IL-21, membrane-bound IL-15, IL-7, IL-18 and IL-2, and/or an antigen.

[0101] As used herein, a “feeder-free” (FF) environment refers to an environment such as a culture condition, cell culture or culture media which is essentially free of feeder cells, and/or which has not been pre-conditioned by the cultivation of feeder cells.

[0102] As used herein, the term “subject” or “subject in need thereof” refers to a mammal, preferably a human being, male or female at any age that is in need of a therapeutic intervention, a cell transplantation or a tissue transplantation. Typically, the subject is in need of therapeutic intervention, cell or tissue transplantation (also referred to herein as recipient) due to a disorder or a pathological or undesired condition, state, or syndrome, or a physical, morphological or physiological abnormality which is amenable to treatment via therapeutic intervention, or cell or tissue transplantation.

[0103] As used herein, a “disruption” or “alteration” in reference to a gene refers to a homologous recombination event with a nucleic acid molecule (e.g., an endogenous gene sequence) which results in elimination or reduction of expression of one or more gene products encoded by the subject gene in a cell, compared to the level of expression of the gene product in the absence of the disruption. Exemplary gene products include mRNA and protein products encoded by the subject gene. Alteration in some cases is transient or reversible and in other cases is permanent. Alteration, in some cases, is of a functional or full-length protein or mRNA, despite the fact that a truncated or nonfunctional product may be produced. In some embodiments herein, gene activity or function, as opposed to expression, is disrupted. Gene alteration is generally induced by artificial methods, i.e., by addition or introduction of a compound, molecule, complex, or composition, and/or by alteration of nucleic acid of (or associated) with the gene, such as at the DNA level. Exemplary methods for gene alteration include gene silencing, knockdown, knockout, and/or gene alteration techniques, such as gene editing. Examples of gene editing methods include CRISPR/Cas systems, meganuclease systems, Zinc Finger Protein (ZFP) and Zinc Finger Nuclease (ZFN) systems and/or transcription activator-like protein (TAL), transcription activator-like effector protein (TALE) or TALE nuclease protein (TALEN) systems. Examples of gene alteration also include antisense technology, such as RNAi, siRNA, shRNA, tandem shRNAs, and/or ribozymes, which generally result in transient reduction of expression, as well as gene editing techniques which result in targeted gene inactivation or alteration, e.g., by induction of breaks and/or homologous recombination. Examples include insertions, mutations, and deletions. The alterations typically result in the repression and/or complete absence of expression of a normal or “wild type” product encoded by the gene. Examples such gene alterations are insertions, frameshift and mis sense mutations, deletions, substitutions, knock-in, and knock-out of the gene or part of the gene, including deletions of the entire gene. Such alterations can occur in the coding region, e.g., in one or more exons, resulting in the inability to produce a full-length product, functional product, or any product, such as by insertion of a stop codon. Such alterations may also occur by alterations in the promoter or enhancer or other region affecting activation of transcription, so as to prevent transcription of the gene. Gene alterations include gene targeting, including targeted gene inactivation by homologous recombination.

[0104] An “immune disorder,” “immune-related disorder,” or “immune-mediated disorder” refers to a disorder in which the immune response plays a key role in the development or progression of the disease. Immune-mediated disorders include autoimmune disorders, allograft rejection, graft versus host disease and inflammatory and allergic conditions.

[0105] An “immune response” is a response of a cell of the immune system, such as a NK cell, B cell, or a T cell, or innate immune cell to a stimulus. In some embodiments, the response is specific for a particular antigen (an “antigen-specific response”).

[0106] As used herein, the term “antigen” is a molecule capable of being bound by an antibody or T cell receptor. An antigen may generally be used to induce a humoral immune response and/or a cellular immune response leading to the production of B and/or T lymphocytes.

[0107] The terms “tumor-associated antigen,” “tumor antigen” and “cancer cell antigen” are used interchangeably herein. In each case, the terms refer to proteins, glycoproteins or carbohydrates that are specifically or preferentially expressed by cancer cells.

[0108] An “autoimmune disease” refers to a disease in which the immune system produces an immune response (for example, a B cell or a T cell response) against an antigen that is part of the normal host (that is, an autoantigen), with consequent injury to tissues. An autoantigen may be derived from a host cell or may be derived from a commensal organism such as the micro-organisms (known as commensal organisms) that normally colonize mucosal surfaces.

[0109] The term “Graft-Versus-Host Disease (GVHD)” refers to a common and serious complication of bone marrow or other tissue transplantation wherein there is a reaction of donated immunologically competent lymphocytes against a transplant recipient's own tissue. GVHD is a possible complication of any transplant that uses or contains stem cells from either a related or an unrelated donor. In some embodiments, the GVHD is chronic GVHD (cGVHD).

[0110] A “parameter of an immune response” is any particular measurable aspect of an immune response, including, but not limited to, cytokine secretion (IL-6, IL-10, IFN-γ, etc.), chemokine secretion, altered migration or cell accumulation, immunoglobulin production, dendritic cell maturation, regulatory activity, number of immune cells and proliferation of any cell of the immune system. Another parameter of an immune response is structural damage or functional deterioration of any organ resulting from immunological attack. One of skill in the art can readily determine an increase in any one of these parameters, using known laboratory assays. In one specific non-limiting example, to assess cell proliferation, incorporation of ³H-thymidine can be assessed. A “substantial” increase in a parameter of the immune response is a significant increase in this parameter as compared to a control. Specific, non-limiting examples of a substantial increase are at least about a 50% increase, at least about a 75% increase, at least about a 90% increase, at least about a 100% increase, at least about a 200% increase, at least about a 300% increase, and at least about a 500% increase. Similarly, an inhibition or decrease in a parameter of the immune response is a significant decrease in this parameter as compared to a control. Specific, non-limiting examples of a substantial decrease are at least about a 50% decrease, at least about a 75% decrease, at least about a 90% decrease, at least about a 100% decrease, at least about a 200% decrease, at least about a 300% decrease, and at least about a 500% decrease. A statistical test, such as a non-parametric ANOVA, or a T-test, can be used to compare differences in the magnitude of the response induced by one agent as compared to the percent of samples that respond using a second agent. In some examples, p≤0.05 is significant, and indicates that the chance that an increase or decrease in any observed parameter is due to random variation is less than 5%. One of skill in the art can readily identify other statistical assays of use.

[0111] “Treating” or “treatment of a disease or condition” refers to executing a protocol or treatment plan, which may include administering one or more drugs or active agents (e.g., genetically engineered immune cells, e.g., genetically engineered NK cells) to a patient, in an effort to alleviate signs or symptoms of the disease or the recurrence of the disease. Desirable effects of treatment include decreasing the rate of disease progression, ameliorating or palliating the disease state, and remission, increased survival, improved quality of life or improved prognosis. Alleviation or prevention can occur prior to signs or symptoms of the disease or condition appearing, as well as after their appearance. In addition, “treating” or “treatment” does not require complete alleviation of signs or symptoms, and does not require a cure.

[0112] The term “therapeutic benefit” or “therapeutically effective” as used throughout this application refers to anything that promotes or enhances the well-being of the subject with respect to the medical treatment of this condition. This includes, but is not limited to, a reduction in the frequency, severity, or rate of progression of the signs or symptoms of a disease. For example, treatment of cancer may involve, for example, a reduction in the size of a tumor, a reduction in the invasiveness of a tumor, reduction in the growth rate of the cancer, or a reduction in the rate of metastasis or recurrence. Treatment of cancer may also refer to prolonging survival of a subject with cancer.

[0113] “Antigen recognition moiety” or “antigen recognition domain” refers to a molecule or portion of a molecule that specifically binds to an antigen. In some embodiments, the antigen recognition moiety is an antibody, antibody like molecule or fragment thereof and the antigen is a tumor antigen.

[0114] “Antibody” as used herein refers to monoclonal or polyclonal antibodies. An antibody can be an IgG1, IgG2, IgG3, IgG4, IgM, IgE, or IgA antibody. In some embodiments, an antibody can be a human or humanized antibody.

[0115] “Antibody like molecules” may be for example proteins that are members of the Ig-superfamily which are able to selectively bind a partner.

[0116] The terms “fragment of an antibody,” “antibody fragment,” “functional fragment of an antibody,” and “antigen-binding portion” are used interchangeably herein to mean one or more fragments or portions of an antibody that retain the ability to specifically bind to an antigen (see, generally, Holliger et al. (2005) Nat. Biotech. 23(9): 1126-9). The antibody fragment desirably comprises, for example, one or more CDRs, the variable region (or portions thereof), the constant region (or portions thereof), or combinations thereof. Examples of antibody fragments include, but are not limited to, (i) a Fab fragment; (ii) a F(ab′)₂ fragment; (iii) a Fv fragment; (iv) a single chain Fv (scFv); and (v) a diabody.

[0117] “Chimeric Antigen Receptor” or “CAR” (also known as artificial cell receptors, chimeric cell receptors, or chimeric immunoreceptors) are engineered receptors, which graft a selected specificity onto an immune effector cell. CARs may be employed to impart the specificity of a monoclonal antibody onto an immune cell (e.g., a T cell or an NK cell), thereby allowing a large number of specific immune cells to be generated, for example, for use in adoptive cell therapy. In some embodiments, CARs direct specificity of the immune cell to a tumor-associated antigen. CARs typically have an extracellular domain (ectodomain), which comprises an antigen-binding domain and a stalk region, a transmembrane domain and one or more intracellular (endodomain) domain(s). In some examples, CARs comprise fusions of single-chain variable fragments (scFv) derived from monoclonal antibodies, fused to CD3-zeta a transmembrane domain and endodomain. The specificity of other CAR designs may be derived from ligands of receptors (e.g., peptides) or from pattern-recognition receptors, such as Dectins. In some examples, the spacing of the antigen-recognition domain can be modified to reduce activation-induced cell death. In some examples, CARs comprise domains for additional co-stimulatory signaling, such as CD3zeta, FcR, CD27, CD28, 4-1BB, CD137, DAP10, DAP12, 2B4, ICOS, OX40 and/or OX40L. In some embodiments, molecules can be co-expressed with the CAR, including co-stimulatory molecules, reporter genes for imaging (e.g., for positron emission tomography), safety switch proteins, homing receptors, chemokines, chemokine receptors, cytokines, cytokine receptors, and a TGFbeta signal converter.

[0118] A “stalk” region, which encompasses the terms “spacer region” or “hinge domain” or “hinge” is used to link the antigen-binding domain to the transmembrane domain. As used herein, the term “stalk region” generally means any polypeptide that functions to link the transmembrane domain to, either the extracellular domain or, the cytoplasmic domain in the polypeptide chain of a CAR. In embodiments, the stalk region is flexible enough to allow the antigen-binding domain to orient in different directions to facilitate antigen recognition. In some embodiments, the hinge domain is derived from IgG1 the CH2CH3 region of immunoglobulin, and portions of CD3. In some embodiments, the stalk region is a CD8alpha (also referred to herein as CD8a and CD8a) hinge (SEQ ID NO: 619). The term “functional portion,” when used in reference to a CAR, refers to any part or fragment of a CAR described herein, which part or fragment retains the biological activity of the CAR of which it is a part (the parent CAR). In reference to a nucleic acid sequence encoding the parent CAR, a nucleic acid sequence encoding a functional portion of the CAR can encode a protein comprising, for example, at least about 10%, 25%, 30%, 50%, 68%, 80%, 90%, 95%, or more, of the parent CAR.

[0119] The term “functional variant,” as used herein, refers to a polypeptide, or a protein having substantial or significant sequence identity or similarity to the reference polypeptide, and retains the biological activity of the reference polypepide of which it is a variant. Functional variants encompass, for example, those variants of the CAR described herein (the parent CAR) that retain the ability to recognize target cells to a similar extent, the same extent, or to a greater extent, as the parent CAR. In reference to a nucleic acid sequence encoding the parent CAR, a nucleic acid sequence encoding a functional variant of the CAR can be for example, at least about 10% identical, at least about 25% identical, at least about 30% identical, at least about 50% identical, at least about 65% identical, at least about 70% identical, at least about 75% identical, at least about 80% identical, at least about 85% identical, at least about 90% identical, at least about 95% identical, or at least about 99% identical to the nucleic acid sequence encoding the parent CAR.

[0120] The phrases “pharmaceutical or pharmacologically acceptable” refers to molecular entities and compositions that do not produce an adverse, allergic, or other untoward reaction when administered to an animal, such as a human, as appropriate. For animal (e.g., human) administration, it will be understood that preparations should meet sterility, pyrogenicity, general safety, and purity standards as required, e.g., by the FDA Office of Biological Standards.

[0121] As used herein, “pharmaceutically acceptable carrier” includes any and all aqueous biocompatible solvents (e.g., saline solutions, phosphate buffered saline, parenteral vehicles, such as sodium chloride, Ringer's dextrose, etc.), antioxidants, preservatives (e.g., antibacterial or antifungal agents, anti-oxidants, chelating agents, and inert gases), isotonic agents, such like materials and combinations thereof, as would be known to one of ordinary skill in the art. The pH and exact concentration of the various components in a pharmaceutical composition are adjusted according to well-known parameters.

[0122] The term “T cell” refers to T lymphocytes, and includes, but is not limited to, γ:δ⁺ T cells, NK T cells, CD4⁺ T cells and CD8⁺ T cells. CD4⁺ T cells include THO, Tₕ1 and TH2 cells, as well as regulatory T cells (T_{reg}). There are at least three types of regulatory T cells: CD4⁺CD25⁺ T_{reg}, CD25 T_{H}3 T_{reg}, and CD25 T_{R} 1 T_{reg}. “Cytotoxic T cell” refers to a T cell that can kill another cell. The majority of cytotoxic T cells are CD8⁺ MHC class I-restricted T cells, however some cytotoxic T cells are CD4⁺. In preferred embodiments, the T cell of the present disclosure is CD4⁺ or CD8⁺.

[0123] The activation state of a T cell defines whether the T cell is “resting” (i.e., in the G₀ phase of the cell cycle) or “activated” to proliferate after an appropriate stimulus such as the recognition of its specific antigen, or by stimulation with OKT3 antibody, PHA or PMA, etc. The “phenotype” of the T cell (e.g., naive, central memory, effector memory, lytic effectors, help effectors (TH1 and TH2 cells), and regulatory effectors), describes the function the cell exerts when activated. A healthy donor has T cells of each of these phenotypes, and which are predominately in the resting state. A naive T cell will proliferate upon activation, and then differentiate into a memory T cell or an effector T cell. It can then assume the resting state again, until it gets activated the next time, to exert its new function and may change its phenotype again. An effector T cell will divide upon activation and antigen-specific effector function.

[0124] “Natural killer T cells” (“NKT cells”), not to be confused with natural killer cells of the innate immune system, bridge the adaptive immune system with the innate immune system. Unlike conventional T cells that recognize peptide antigens presented by major histocompatibility complex (WIC) molecules, NKT cells recognize glycolipid antigen presented by a molecule called CD1d. Once activated, these cells can perform functions ascribed to both Th and Tc cells (i.e., cytokine production and release of cytolytic/cell killing molecules). They are also able to recognize and eliminate some tumor cells and cells infected with herpes viruses.

[0125] “Natural killer cells” (“NK cells”) are a type of cytotoxic lymphocyte of the innate immune system. In some instances, NK cells provide a first line defense against viral infections and/or tumor formation. NK cells can detect MHC presented on infected or cancerous cells, triggering cytokine release, and subsequently induce lysis and apoptosis. NK cells can further detect stressed cells in the absence of antibodies and/or MHC, thereby allowing a rapid immune response.

[0126] “AML,” as used herein, refers to acute myelogenous leukemia, also known as acute myelocytic leukemia, acute myeloid leukemia, acute granulocytic leukemia, and acute non-lymphocytic leukemia. AML is differentiated from the other main forms of leukemia because it is a rapidly progressing malignancy of the myeloid lineage. AML has eight different subtypes based on the cell type that the leukemia developed from. One method of classifying the subtypes is the WHO classification method (Dohner et al. Blood 129: 424-47, 2017). The term “AML” therefore refers to all subtypes, including myeloblastic (MO) on special analysis, myeloblastic (MI) without maturation, myeloblastic (M2) with maturation, promyeloctic (M3), myelomonocytic (M4), monocytic (M5), erythroleukemia (M6) and megakaryocytic (M7).

[0127] “Relapsed AML” refers to patients who have experienced a recurrence following an interval of remission of AML.

[0128] “Refractory AML” refers to patients whose disease does not respond to the first cycle of initial standard induction therapy (e.g, anthracycline and/or cytarabine-based therapy). In some embodiments, “refractory AML” refers to patients who lack remission following initial therapy. In some embodiments, “refractory AML” refers to subjects whose disease does not respond to one or two or more cycles of standard induction therapy.

[0129] The term “antigen presenting cells” or “APCs” refers to a class of cells capable of presenting one or more antigens in the form of peptide-MHC complex recognizable by specific effector cells of the immune system, and thereby inducing an effective cellular immune response against the antigen or antigens being presented. APCs can be intact whole cells such as macrophages, B cells, endothelial cells, activated T cells, and dendritic cells; or other molecules, naturally occurring or synthetic, such as purified MHC Class I molecules complexed to 2-microglobulin.

[0130] The term “culturing” refers to the in vitro maintenance, differentiation, and/or propagation of cells in suitable media. By “enriched” is meant a composition comprising cells present in a greater percentage of total cells than is found in the tissues where they are present in an organism.

[0131] An “anti-cancer” agent is capable of negatively affecting a cancer cell/tumor in a subject, for example, by promoting killing of cancer cells, inducing apoptosis in cancer cells, reducing the growth rate of cancer cells, reducing the incidence, number, and/or rate of development of metastases, reducing solid tumor size, inhibiting tumor growth, reducing the blood supply to a tumor or cancer cells, promoting an immune response against cancer cells or a tumor, preventing or inhibiting the progression of cancer, or increasing the lifespan of a subject with cancer.

[0132] As used herein, the term “click reaction” refers to a range of reactions used to covalently link a first and a second moiety, for convenient production of linked products. It typically has one or more of the following characteristics: it is fast, is specific, is high-yield, is efficient, is spontaneous, does not significantly alter biocompatibility of the linked entities, has a high reaction rate, produces a stable product, favors production of a single reaction product, has high atom economy, is chemoselective, is modular, is stereoselective, is insensitive to oxygen, is insensitive to water, is high purity, generates only inoffensive or relatively non-toxic by-products that can be removed by nonchromatographic methods (e.g., crystallization or distillation), needs no solvent or can be performed in a solvent that is benign or physiologically compatible, e.g., water, stable under physiological conditions. Examples include an alkyne/azide reaction, a diene/dienophile reaction, or a thiol/alkene reaction. Other reactions can be used. In some embodiments, the click reaction is fast, specific, and high yield.

[0133] As used herein, the term “click handle” refers to a chemical moiety that is capable of reacting with a second click handle in a click reaction to produce a click signature. In embodiments, a click handle is comprised by a coupling reagent, and the coupling reagent may further comprise a substrate reactive moiety.

[0134] As used herein, the term “sortase,” refers to an enzyme which catalyzes a transpeptidation reaction between a sortase recognition motif and a sortase acceptor motif. As used herein, the transpeptidation reaction between a sortase recognition motif and a sortase acceptor motif is termed a “sortase-mediated transpeptidation reaction”. Various sortases from prokaryotic organisms have been identified. In some embodiments, the sortase catalyzes a reaction to conjugate the C-terminus of a first moiety containing a sortase recognition motif to the N-terminus of a second moiety containing a sortase acceptor motif by a peptide bond. In some embodiments, the sortase catalyzes a reaction to couple a first moiety to a second moiety by a peptide bond. In some embodiments, sortase mediated transfer is used to couple the N-terminus of a first polypeptide, e.g., an extracellular binding domain of a protein on an NK cell to the N-terminus of a second polypeptide, e.g., an antigen binding domain, to the N terminus of a second polypeptide. In such embodiments, sortase mediated transfer is used to attach a coupling moiety, e.g., a “click” handle, to the N-terminus of each polypeptide, wherein the coupling moieties mediate coupling of the polypeptides. In an embodiment the first polypeptide is an extracellular binding domain, e.g., an antigen binding domain, comprising a sortase acceptor motif, and the second polypeptide is a transmembrane polypeptide comprising an extracellular N-terminal sortase acceptor motif, a transmembrane domain, and an intracellular signaling domain. Sortase mediated transfer is used to attach a coupling moiety, e.g., a click handle, to each polypeptide.

[0135] “Sortase acceptor motif,” as that term is used herein, refers to a moiety that that acts as an acceptor for the sortase-mediated transfer of a polypeptide, from the sortase, to the sortase acceptor motif. In an embodiment the sortase acceptor motif is located at the N terminus of a polypeptide. In an embodiment the transferred polypeptide is linked by a peptide bond at its C terminus to the N terminal residue of the sortase acceptor motif. N-terminal acceptor motifs include Gly-[Gly]ₙ- (SEQ ID NO: 2), wherein n=0-5 and Ala-[Ala]ₙ- (SEQ ID NO: 3), wherein n=0-5.

[0136] “Sortase recognition motif,” as that term is used herein, refers to polypeptide which, upon cleavage by a sortase, e.g., a, forms a thioester bond with the sortase. In an embodiment, sortase cleavage occurs between T and G/A. In an embodiment the peptide bond between T and G/A is replaced with an ester bond to the sortase.

[0137] “Sortase transfer signature,” as that term is used herein, refers to the portion of a sortase recognition motif and the portion of a sortase acceptor motif remaining after the reaction that couples the former to the latter. In an embodiment, wherein the sortase recognition motif is LPXTG/A (SEQ ID NO: 4) and wherein the sortase acceptor motif is GG, the resultant sortase transfer signature after sortase-mediated reaction comprises LPXTGG (SEQ ID NO: 5).

[0138] An “inhibitory extracellular domain,” as that term is used herein, refers to polypeptide comprising an extracellular domain of an inhibitory molecule. Normally, binding to its counterligand has an inhibitory effect on the generation of an immune effector response (e.g., NK cell activation or response). When linked, e.g., fused to an intracellular signaling domain, it redirects an interaction that normally inhibits the generation of an immune effector response into one that promotes an immune effector response.

[0139] “Inhibitory molecule,” as that term is used herein, refers to a molecule, e.g., an endogenous molecule, of a cell described herein that upon binding to its cognate counter ligand on a target cell, minimizes, e.g., suppresses or inhibits, an immune effector response (e.g., NK cell activation or response). Examples of inhibitory molecules include PD1, PD-L1, PD-L2, CTLA4, TIM3, CEACAM (e.g., CEACAM-1, CEACAM-3 and/or CEACAM-5), LAG3, VISTA, BTLA, TIGIT, LAIR1, CD160, 2B4, CD80, CD86, B7-H3 (CD276), B7-H4 (VTCN1), HVEM (TNFRSF14 or CD270), KIR, A2aR, MHC class I, MHC class II, GAL9, adenosine, and a TGF beta receptor (e.g., TGFBRI and TGFBRII).

### II. Immune Cells

[0140] Certain embodiments of the present disclosure concern immune cells (e.g., NK cells or T cells) having decreased levels (e.g., about a 1% to about a 100%, about a 1% to about a 95%, about a 1% to about a 90%, about a 1% to about a 85%, about a 1% to about a 80%, about a 1% to about a 75%, about a 1% to about a 70%, about a 1% to about a 65%, about a 1% to about a 60%, about a 1% to about a 55%, about a 1% to about a 50%, about a 1% to about a 45%, about a 1% to about a 40%, about a 1% to about a 35%, about a 1% to about a 30%, about a 1% to about a 25%, about a 1% to about 20%, about a 1% to about a 15%, about a 1% to about a 10%, about a 1% to about a 5%, about a 5% to about a 100%, about a 5% to about a 95%, about a 5% to about a 90%, about a 5% to about a 85%, about a 5% to about a 80%, about a 5% to about a 75%, about a 5% to about a 70%, about a 5% to about a 65%, about a 5% to about a 60%, about a 5% to about a 55%, about a 5% to about a 50%, about a 5% to about a 45%, about a 5% to about a 40%, about a 5% to about a 35%, about a 5% to about a 30%, about a 5% to about a 25%, about a 5% to about 20%, about a 5% to about a 15%, about a 5% to about a 10%, about a 10% to about a 100%, about a 10% to about a 95%, about a 10% to about a 90%, about a 10% to about a 85%, about a 10% to about a 80%, about a 10% to about a 75%, about a 10% to about a 70%, about a 10% to about a 65%, about a 10% to about a 60%, about a 10% to about a 55%, about a 10% to about a 50%, about a 10% to about a 45%, about a 10% to about a 40%, about a 10% to about a 35%, about a 10% to about a 30%, about a 10% to about a 25%, about a 10% to about 20%, about a 10% to about a 15%, about a 15% to about a 100%, about a 15% to about a 95%, about a 15% to about a 90%, about a 15% to about a 85%, about a 15% to about a 80%, about a 15% to about a 75%, about a 15% to about a 70%, about a 15% to about a 65%, about a 15% to about a 60%, about a 15% to about a 55%, about a 15% to about a 50%, about a 15% to about a 45%, about a 15% to about a 40%, about a 15% to about a 35%, about a 15% to about a 30%, about a 15% to about a 25%, about a 15% to about 20%, about a 20% to about a 100%, about a 20% to about a 95%, about a 20% to about a 90%, about a 20% to about a 85%, about a 20% to about a 80%, about a 20% to about a 75%, about a 20% to about a 70%, about a 20% to about a 65%, about a 20% to about a 60%, about a 20% to about a 55%, about a 20% to about a 50%, about a 20% to about a 45%, about a 20% to about a 40%, about a 20% to about a 35%, about a 20% to about a 30%, about a 20% to about a 25%, about a 25% to about a 100%, about a 25% to about a 95%, about a 25% to about a 90%, about a 25% to about a 85%, about a 25% to about a 80%, about a 25% to about a 75%, about a 25% to about a 70%, about a 25% to about a 65%, about a 25% to about a 60%, about a 25% to about a 55%, about a 25% to about a 50%, about a 25% to about a 45%, about a 25% to about a 40%, about a 25% to about a 35%, about a 25% to about a 30%, about a 30% to about a 100%, about a 30% to about a 95%, about a 30% to about a 90%, about a 30% to about a 85%, about a 30% to about a 80%, about a 30% to about a 75%, about a 30% to about a 70%, about a 30% to about a 65%, about a 30% to about a 60%, about a 30% to about a 55%, about a 30% to about a 50%, about a 30% to about a 45%, about a 30% to about a 40%, about a 30% to about a 35%, about a 35% to about a 100%, about a 35% to about a 95%, about a 35% to about a 90%, about a 35% to about a 85%, about a 35% to about a 80%, about a 35% to about a 75%, about a 35% to about a 70%, about a 35% to about a 65%, about a 35% to about a 60%, about a 35% to about a 55%, about a 35% to about a 50%, about a 35% to about a 45%, about a 35% to about a 40%, about a 40% to about a 100%, about a 40% to about a 95%, about a 40% to about a 90%, about a 40% to about a 85%, about a 40% to about a 80%, about a 40% to about a 75%, about a 40% to about a 70%, about a 40% to about a 65%, about a 40% to about a 60%, about a 40% to about a 55%, about a 40% to about a 50%, about a 40% to about a 45%, about a 45% to about a 100%, about a 45% to about a 95%, about a 45% to about a 90%, about a 45% to about a 85%, about a 45% to about a 80%, about a 45% to about a 75%, about a 45% to about a 70%, about a 45% to about a 65%, about a 45% to about a 60%, about a 45% to about a 55%, about a 45% to about a 50%, about a 50% to about a 100%, about a 50% to about a 95%, about a 50% to about a 90%, about a 50% to about a 85%, about a 50% to about a 80%, about a 50% to about a 75%, about a 50% to about a 70%, about a 50% to about a 65%, about a 50% to about a 60%, about a 50% to about a 55%, about a 55% to about a 100%, about a 55% to about a 95%, about a 55% to about a 90%, about a 55% to about a 85%, about a 55% to about a 80%, about a 55% to about a 75%, about a 55% to about a 70%, about a 55% to about a 65%, about a 55% to about a 60%, about a 60% to about a 100%, about a 60% to about a 95%, about a 60% to about a 90%, about a 60% to about a 85%, about a 60% to about a 80%, about a 60% to about a 75%, about a 60% to about a 70%, about a 60% to about a 65%, about a 65% to about a 100%, about a 65% to about a 95%, about a 65% to about a 90%, about a 65% to about a 85%, about a 65% to about a 80%, about a 65% to about a 75%, about a 65% to about a 70%, about a 70% to about a 100%, about a 70% to about a 95%, about a 70% to about a 90%, about a 70% to about a 85%, about a 70% to about a 80%, about a 70% to about a 75%, about a 75% to about a 100%, about a 75% to about a 95%, about a 75% to about a 90%, about a 75% to about a 85%, about a 75% to about a 80%, about a 80% to about a 100%, about a 80% to about a 95%, about a 80% to about a 90%, about a 80% to about a 85%, about a 85% to about a 100%, about a 85% to about a 95%, about a 85% to about a 90%, about a 90% to about a 100%, about a 90% to about a 95%, or about a 95% to about a 100%, decrease) of CD70 (e.g., protein or mRNA) as compared to an immune cell of the same type (e.g., an NK cell or a T cell) that is not contacted with the CD70 inhibitor (e.g., a wild-type NK cell or a population of wild-type NK cells), e.g., produced using any of the exemplary methods described herein. In some embodiments, the genetically engineered immune cells (e.g., genetically engineered NK cells or genetically engineered T cells) express a CAR (e.g., one or more of any of the exemplary CARs described herein). In some embodiments, the genetically engineered immune cells comprise at least one exogenous polypeptide. In some embodiments, the at least one exogenous polypeptide is selected from the group of: a cytokine, a chemokine, a ligand, a receptor, a monoclonal antibody, a bispecific T cell engager, a peptide, or an enzyme, a subunit or a portion of the foregoing, or any combination of the foregoing. In some embodiments, the at least one exogenous polypeptide comprises a cytokine and wherein the cytokine comprises IL-15, membrane-bound IL-15 (mbIL-15), IL-2, membrane-bound IL-2, IL-12, membrane-bound IL-12, IL-18, membrane-bound IL-18, IL-21, membrane-bound IL-21, p40, LIGHT, CD40L, FLT3L, 4-1BBL, or FASL. In some embodiments, the at least one exogenous polypeptide comprises a receptor selected from the group of: CSF-1R, a CXC chemokine receptor, a CC chemokine receptor, a CX3C chemokine receptor, a XC chemokine receptor, or a chemokine-binding fragment thereof. In some embodiments, the at least one exogenous polypeptide is a protein that overcomes immunosuppression of the tumor microenvironment (e.g., a TGFbeta signal converter or a TGFbeta decoy receptor). In some embodiments, the at least one exogenous polypeptide comprises a safety switch protein.

[0141] In some embodiments, the immune cells express a chimeric antigen receptor (CAR). The immune cells may be T cells (e.g., regulatory T cells, CD4⁺ T cells, CD8⁺ T cells, or gamma-delta T cells), NK cells, invariant NK cells, NKT cells, stem cells (e.g., mesenchymal stem cells (MSCs) or induced pluripotent stem (iPSC) cells). In some embodiments, the cells are monocytes or granulocytes, e.g., myeloid cells, macrophages, neutrophils, dendritic cells, mast cells, eosinophils, and/or basophils. Also provided herein are methods of producing and engineering the immune cells as well as methods of using and administering the cells for adoptive cell therapy, in which case the cells may be autologous or allogeneic. Thus, the immune cells may be used as immunotherapy, such as to target cancer cells.

[0142] The immune cells may be isolated from subjects, particularly human subjects. The immune cells can be obtained from a subject of interest, such as a subject suspected of having a particular disease or condition, a subject suspected of having a predisposition to a particular disease or condition, or a subject who is undergoing therapy for a particular disease or condition. The immune cells may be enriched/purified from any tissue where they reside including, but not limited to, blood (including blood collected by blood banks or cord blood banks), spleen, bone marrow, tissues removed and/or exposed during surgical procedures, and tissues obtained via biopsy procedures. Tissues/organs from which the immune cells are enriched, isolated, and/or purified may be isolated from both living and non-living subjects, wherein the non-living subjects are organ donors. The isolated immune cells may be used directly, or they can be stored for a period of time, such as by freezing. In some embodiments, the immune cells are isolated from blood, such as peripheral blood or cord blood. In some embodiments, immune cells isolated from cord blood have enhanced immunomodulation capacity, such as measured by CD4-positive or CD8-positive T cell suppression. In specific aspects, the immune cells are isolated from pooled blood, particularly pooled cord blood, for enhanced immunomodulation capacity. The pooled blood may be from 2 or more sources, such as 3, 4, 5, 6, 7, 8, 9, 10 or more sources (e.g., donor subjects).

[0143] The population of immune cells can be obtained from a subject in need of therapy or suffering from a disease associated with reduced immune cell activity. Thus, the cells will be autologous to the subject in need of therapy. Alternatively, the population of immune cells can be obtained from a donor. The immune cell population can be harvested from the peripheral blood, cord blood, bone marrow, spleen, or any other organ/tissue in which immune cells reside in said subject or donor. The immune cells can be isolated from a pool of subjects and/or donors, such as from pooled cord blood.

[0144] When the population of immune cells is obtained from a donor distinct from the subject, the donor is preferably allogeneic, provided the cells obtained are subject-compatible in that they can be introduced into the subject. Allogeneic donor cells may or may not be human leukocyte antigen (HLA)-compatible. To be rendered subject-compatible, allogeneic cells can be treated to reduce immunogenicity.

### 1. NK Cells

[0145] In some embodiments, the immune cells are NK cells. NK cells are a subpopulation of lymphocytes that have spontaneous cytotoxicity against a variety of tumor cells, virus-infected cells, and some normal cells in the bone marrow and thymus. NK cells can be detected by specific surface markers, such as CD16, CD56, and CD8 in humans. NK cells do not express T cell antigen receptors, the pan T marker CD3, or surface immunoglobulin B cell receptors.

[0146] Expansion of NK Cells

[0147] NK cells can be expanded by various methods known in the art. In some instances, NK cells can be expanded or enriched from large volumes of peripheral blood, such as an apheresis products (e.g., mobilized PBSCs or unmobilized PBSCs). In other instances, NK cells can be expanded or enriched from smaller number of blood or stem cells. Expansion of NK cells from apharesis products are described, for example, in Lapteva et al. Crit. Rev. Oncog. 19:121-132, 2014; Miller et al. Blood 105(8):3051-7, 2005; Lapteva et al. Cytotherapy 14(9):1131-43, 2012; Spanholtz et al. PLoS One 6(6):e20740, 2011; Knorr et al. Stem Cells Transl. Med. 2(4):274-83, 2013; Pfeiffer et al. Leukemia 26(11):2435-9,2012; Shi et al. Br. J. Haematol. 143(5):641-53, 2008; Passweg et al. Leukemia 18(11):1835-8, 2004; Koehl et al. Klin. Padiatr. 217(6):345-50, 2005; and Klingemann et al. Transfusion 53(2):412-8, 2013. Approaches that generate NK cells for allogeneic use aim to minimize CD3⁺ T-lymphocyte populations that may cause graft-versus-host disease (GVHD). This often involves depletion of CD3⁺ T cells, which increases the total number of starting cells required, particularly if depletion is performed at the end of the manufacturing procedure. Most protocols, therefore, use apheresis products (1×10⁹-20×10⁹ mononuclear cells) as the starting material; however, expansion from other sources such as buffy coats, cord blood, and embryonic stem cells is also possible. NK cells in peripheral blood and apheresis products can be detected by flow cytometry as CD45⁺CD56⁺CD3⁻ cells. In some instances, NK cells can be enriched from apheresis products by one or two rounds of depletion of CD3⁺ T cells using magnetic beads (e.g., CLINIMACS magnetic beads) coated with anti-CD3 antibody (e.g., CLINIMACS CD3 reagent) with or without overnight activation using IL-2 or IL-15. This method can produce up to 2×10⁹NK cells with approximately 20% purity, while contaminating CD19⁺ B cells, and CD14⁺ monocytes can comprise greater than 50% of the product. Additional depletion of CD19⁺ B cells with anti-CD19 antibody-coated magnetic beads (e.g., CliniMACS CD19 reagent) can further improve the purity of the NK cells, resulting in an average of 40% CD56⁺CD3⁻ in the final product. Alternatively, NK cells can be enriched by isolating CD56⁺ cells using anti-CD56 monoclonal antibody (e.g., CLINIMACS CD56 reagent) with or without CD3⁺ T cell depletion. Without CD3⁺ T cell depletion, this method can yield more than 95% NK cell purity while retaining CD56⁺CD3⁺ natural killer like T (NKT) cells, which also may contribute to anti-tumor immune responses, whereas the inclusion of CD3⁺ T-cell depletion can yield up to 99% purity.

[0148] In some instances, NK cells can be expanded using feeder cell-based technology. Such methods are described, for example, in Berg et al. Cytotherapy 11(3):341-55, 2009; Lapteva et al. 2012, supra; and Lapteva et al. Crit. Rev. Oncog. 19:121-132, 2014. Because therapeutic use of NK cells demand high NK cell doses and often several infusions, one apheresis product may not contain sufficient numbers of NK cells. Therefore, technically complicated NK cell expansion protocols have been developed. Expansion of NK cells with either IL-2 or IL-15 or both to produce 1,000-fold expansion requires a culture period of up to 12 weeks. By contrast, feeder cell-based NK expansion approaches are rapid and robust, as large numbers of NK cells become available for infusion within 10-14 days (Lapteva et al., 2012, supra). Feeder-cell methods generally require cytokines as well as irradiated feeder cells, such as EBV-LCLs or genetically modified K562 cells, to produce large numbers of CD3⁻56⁺ NK cells with greater than 70% purity from peripheral blood mononuclear cells (PBMCs). CD3-depleted, CD56-enriched PBMCs can be cultured in the presence of EBV-LCL feeders and X-VIVO 20 medium supplemented with 10% heat inactivated human AB serum, 500 U mL⁻¹ IL-2 and 2 mM L-alanyl-L-glutamine to yield 490±260-fold expansion of NK cells over 21 days of culture, with a purity of 84.3±7.8% CD56⁺CD16⁺ cells (Berg et al. Cytotherapy, 11(3):341-55, 2009).

[0149] In some instances, NK cells can be expanded using a genetically modified feeder cell expansion system, as described, for example, in Yang et al. (Mol. Therapy 18:428-445, 2020). In such expansion methods, human primary NK cells can be expanded directly from PBMCs and cord blood (CB), as well as tumor tissue, using an irradiated, genetically engineered 721.221 cell line (a B cell line derived through mutagenesis that does not express dominant major histocompatibility complex (MHC) class I molecules or expresses a low amount of MHC class I molecules) that expresses membrane-bound interleukin 21 (IL-21) (221-mIL-21), as previous studies show the importance of IL-21 in NK expansion (Ojo et al. Sci. Rep. 9:14916, 2019). In combination with two recombinant cytokines (IL-15 and IL-2), primary NK cells can be expanded nearly 100,000-fold after 2 to 3 weeks of expansion.

Differentiation of NK Cells from Stem Cells

[0150] NK cells can be differentiated from stem cells by various methods known in the art. In some instances, NK cells can be differentiated from induced pluripotent stem cells (iPSCs), human embryonic stem cells (hESCs), mesenchymal stem cells (MSCs), or hematopoietic stem cells (HSCs). Protocols for the differentiation of NK cells from iPSCs and hESCs are described, for example, in Bock et al. J. Vis. Exp. (74):e50337, 2013; Knorr et al. Stem Cells Transl. Med. 2(4):274-83, 2013; Ni et al. Methods Mol. Biol. 1029:33-41, 2013; Zhu and Kaufman (Methods Mol. Biol. 2048:107-19, 2019). In order to differentiate iPSCs to CD34⁺CD45⁺ HPCs, embryonic bodies (EB) can be generated using different approaches, such as spinning of single cell iPSCs in round-shaped wells (spin EBs), culture on murine stroma cells, or direct induction of iPSC monolayer fragments in media with cytokines inducing differentiation towards the hematopoietic lineage. HPCs can be enriched by cell sorting or cell separation of CD34⁺ and/or CD45⁺ cells, and subsequently placed on murine feeder cells (e.g., AFT024, OP9, MS-5, EL08-1D2) in medium containing IL-3 (during the first week), IL-7, IL-15, SCF, IL-2, and Flt3L. NK-cells can also be differentiated without usage of xenogeneic stromal feeder cells, as described, e.g., by Knorr et al. Stem Cells Transl. Med. 2(4):274-83, 2013. CD3″CD56^{bright}CD16^{+/-} NK cells can be differentiated from hiPSC up to stage 4b (NKp80⁺) on OP9-DL1 stroma cells and are highly functional in terms of degranulation, cytokine production and cytotoxicity including antibody-dependent cellular cytotoxicity (ADCC). NK cell yield can be considerably increased through inactivation of feeder cells with mitomycin-C(MMC) without impacting on maturation or functional properties.

[0151] Additionally or in alternative, CD56⁺CD16⁺CD3″ NK cells can be differentiated from human iPSCs and NK-cell development can be characterized by surface expression of NK-lineage markers, as described, e.g., by Euchner et al. Front. Immunol. 12:640672, 2021. Hematopoietic priming of human iPSCs can result in CD34⁺CD45⁺ hematopoietic progenitor cells (HPC) that do not require enrichment for NK lymphocyte propagation. HPC can be further differentiated into NK cells on OP9-DL1 feeder cells resulting in high purity of CD56^{bright}CD16⁻ and CD56^{bright}CD16⁺ NK cells. The output of generated NK cells can be increased by inactivating OP9-DL1 feeder cells with MMC. CD7 expression can be detected from the first week of differentiation indicating priming towards the lymphoid lineage. CD56^{bright}CD16^{-/+} NK cells expressed high levels of DNAM-1, CD69, natural killer cell receptors NKG2A and NKG2D, and natural cytotoxicity receptors NKp46, NKp44, NKp30. Differentiation of NK cells up to stage 4b can be confirmed by assessing the expression of NKp80 on NK cells, and by a perforin⁺ and granzyme B⁺ phenotype. Differentiation of NK cells can also be confirmed by assessing killer cell immunoglobulin-like receptor KIR2DL2/DL3 and KIR3DL1 on NK cells.

[0152] In some instances, CD3⁻CD56⁺ NK cells can be differentiated from CD34⁺ hematopoietic progenitors cells (HPCs), as described, e.g., by Cichocki et al. Front Immunol, 10: 2078, 2019. NK cell development can occur along a continuum whereby common lymphocyte progenitors (CLPs) gradually downregulate CD34 and upregulate CD56. Acquisition of CD94 marks commitment to the CD56^{bright} stage, and CD56^{bright} NK cells subsequently differentiate into CD56^{di}m NK cells that upregulate CD16 and killer immunoglobulin-like receptors (KIR). Support for this linear model comes from analyses of cell populations in secondary lymphoid tissues and in vitro studies of NK cell development from HPCs.

[0153] CD3⁻CD56⁺ NK cells with cytotoxic function can be differentiated in vitro after long-term culture of CD34⁺ cells isolated from cord blood, bone marrow, fetal liver, thymus, or secondary lymphoid tissue with IL-2 or IL-15, as described, e.g., by Mrozek et al. Blood 87:2632-40, 1996; Jaleco et al. J. Immunol. 159:694-702, 1997; Sanchez et al. J. Exp. Med. 178:1857-66, 1993; and Freud et al. Immunity 22:295-304, 2005.

### 2. Stem Cells

[0154] In some embodiments, the immune cells of the present disclosure may be stem cells, such as induced pluripotent stem cells (iPSCs), mesenchymal stem cells (MSCs), or hematopoietic stem cells (HSCs). The pluripotent stem cells used herein may be induced pluripotent stem (iPS) cells. The induction of pluripotency was originally achieved by reprogramming of somatic cells via the introduction of transcription factors that are linked to pluripotency. The use of iPSCs circumvents most of the ethical and practical problems associated with large-scale clinical use of ES cells, and patients with iPSC-derived autologous transplants may not require lifelong immunosuppressive treatments to prevent graft rejection.

[0155] With the exception of germ cells, any cell can be used as a starting point for iPSCs. For example, cell types could be keratinocytes, fibroblasts, hematopoietic cells, mesenchymal cells, liver cells, or stomach cells. There is no limitation on the degree of cell differentiation or the age of an animal from which cells are collected. For example, undifferentiated progenitor cells (including somatic stem cells) and finally differentiated mature cells can be used as sources of somatic cells in the methods disclosed herein.

[0156] Somatic cells can be reprogrammed to produce iPS cells using methods known to one of skill in the art. One of skill in the art can readily produce iPS cells, see for example, U.S. Patent Appl. Publ. Nos. 2009/0246875, 2010/0210014, 2011/0104125, and 2012/0276636; U.S. Pat. Nos. 8,058,065, 8,129,187, 8,268,620, 8,546,140, 9,175,268, 8,741,648, and 8,691,574; and PCT Publication No. WO 2007/069666 A1, all of which are incorporated herein by reference. Generally, nuclear reprogramming factors are used to produce pluripotent stem cells from a somatic cell. In some embodiments, at least three, or at least four, of Klf4, c-Myc, Oct3/4, Sox2, Nanog, and Lin28 are utilized. In other embodiments, Oct3/4, Sox2, c-Myc and Klf4 or Oct3/4, Sox2, Nanog, and Lin28 are utilized. Mouse and human cDNA sequences of these nuclear reprogramming substances are available with reference to the NCBI accession numbers mentioned in WO2007/069666 and U.S. Pat. No. 8,183,038, which are incorporated herein by reference. Methods for introducing one or more reprogramming substances, or nucleic acids encoding these reprogramming substances, are known in the art, and disclosed for example, in U.S. Pat. Nos. 8,268,620, 8,691,574, 8,741,648, 8,546, 140, 8,900,871 and 8,071,369, all of which are incorporated herein by reference.

[0157] Once derived, iPSCs can be cultured in a medium sufficient to maintain pluripotency. The iPSCs may be used with various media and techniques developed to culture pluripotent stem cells, more specifically, embryonic stem cells, as described in U.S. Pat. No. 7,442,548 and U.S. Patent Pub. No. 2003/0211603. In the case of mouse cells, the culture is carried out with the addition of Leukemia Inhibitory Factor (LIF) as a differentiation suppression factor to an ordinary medium. In the case of human cells, it is desirable that basic fibroblast growth factor (bFGF) be added in place of LIF. Other methods for the culture and maintenance of iPSCs, as would be known to one of skill in the art, may be used with the methods disclosed herein.

[0158] In certain embodiments, undefined conditions may be used; for example, pluripotent cells may be cultured on fibroblast feeder cells or a medium that has been exposed to fibroblast feeder cells in order to maintain the stem cells in an undifferentiated state. In some embodiments, the cell is cultured in the co-presence of mouse embryonic fibroblasts treated with radiation or an antibiotic to terminate the cell division, as feeder cells. Alternately, pluripotent cells may be cultured and maintained in an essentially undifferentiated state using a defined, feeder-independent culture system, such as a TESR™ medium or E8™/Essential 8™ medium.

### 3. Genetically Engineered Antigen Receptors

[0159] The immune cells of the disclosure (e.g., autologous or allogeneic T cells (e.g., regulatory T cells, CD4⁺ T cells, CD8⁺ T cells, or gamma-delta T cells), NK cells, invariant NK cells, NKT cells, stem cells (e.g., MSCs or iPS cells) can be genetically engineered to express antigen receptors such as engineered CARs and/or TCRs. For example, the host cells (e.g, autologous or allogeneic NK cells) are modified to express a CAR having antigenic specificity for a cancer antigen. In particular embodiments, NK cells are engineered to express a CAR. The NK cells may be further engineered to express a TCR. Multiple CARs and/or TCRs, such as to different antigens, may be added to a single cell type, such as NK cells. Suitable methods of modification are known in the art (see, instance e.g., Sambrook et al. Molecular Cloning: A Laboratory Manual, 3rd ed., Cold Spring Harbor Press, Cold Spring Harbor, N.Y., 2001; and Ausubel et al., Current Protocols in Molecular Biology, Greene Publishing Associates and John Wiley & Sons, N Y, 1994).

[0160] In some embodiments, the cells comprise one or more nucleic acids introduced via genetic engineering that encode one or more antigen receptors, and genetically engineered products of such nucleic acids. In some embodiments, the nucleic acids are heterologous. In some embodiments, the nucleic acids are not naturally occurring, such as a nucleic acid not found in nature (e.g., chimeric).

[0161] In some embodiments, the CAR contains an extracellular antigen-recognition domain that specifically binds to an antigen (e.g., a tumor antigen or a pathogen antigen). In some embodiments, the antigen is a protein expressed on the surface of cells (e.g., cancerous cells).

[0162] Exemplary engineered antigen receptors, including CARs and recombinant TCRs, as well as methods for engineering and introducing the receptors into cells, include those described, for example, in PCT Publication Nos. WO 2000/14257, WO 2013/126726, WO 2012/129514, WO 2014/031687, WO 2013/166321, WO 2013/071154, and WO 2013/123061; U.S. Patent Application Publication Nos. US2002/131960, US2013/287748, and US2013/0149337; U.S. Pat. Nos. 6,451,995, 7,446,190, 8,252,592, 8,339,645, 8,398,282, 7,446,179, 6,410,319, 7,070,995, 7,265,209, 7,354,762, 7,446,190, 7,446,191, 8,324,353, and 8,479,118; International Patent Application Publication No.: WO 2014/055668 A1 and European Patent Application Publication No. EP2537416.

### 4. Chimeric Antigen Receptors

[0163] In some aspects, the present disclosure provides a population of NK cells engineered to express a chimeric antigen receptor (CAR), and/or a polynucleotide encoding a CAR, wherein the CAR comprises (a) an extracellular domain comprising an antigen recognition domain that specifically binds human CD70; (b) a transmembrane domain; and (c) an intracellular domain. In some embodiments, the intracellular domain of the CAR comprises one or more (e.g., one, two, three, or more) co-stimulatory domains. In some embodiments, the intracellular domain of the CAR comprises one or more (e.g., one, two, three, or more) activation domains. In some embodiments, the CAR comprises a) an antigen recognition domain that specifically binds to human CD70, b) a hinge domain, c) a transmembrane domain, d) a costimulatory domain and e) an activation domain.

[0164] In some embodiments, the engineered antigen receptors include CARs, including activating or stimulatory CARs, co-stimulatory CARs (see, e.g., PCT Publ. No. WO 2014/055668), and/or inhibitory CARs (iCARs, see, e.g., Fedorov et al., Sci. Transl. Med. 5(215):215ra172, 2013).

[0165] A. Antigen Recognition Domains

[0166] In some embodiments, the antigen recognition domain of the CARs described herein may recognize an epitope comprising the shared space between one or more antigens. In some embodiments, the antigen recognition domain comprises complementary determining regions (CDRs) of a monoclonal antibody, variable regions of a monoclonal antibody, an scFv, a single domain antibody (e.g., a camelid single domain antibody), an antibody mimetic and/or antigen binding fragments thereof. In some embodiments, the specificity of the antigen recognition domain is derived from a protein or peptide (e.g., a ligand in a receptor-ligand pair) that specifically binds to another protein or peptide (e.g., a receptor in a receptor-ligand pair). In some embodiments, the antigen recognition domain comprises an aptamer, a T cell receptor (TCR)-like antibody, or a single chain TCR (scTCR). Almost any moiety that binds a given target (e.g., tumor associated antigen (TAA)) with high affinity can be used as an antigen recognition domain. The arrangement of the antigen recognition domain could be multimeric, such as a diabody or multimers. In some embodiments, the multimers can be formed by cross pairing of the variable portion of the light and heavy chains into a diabody.

[0167] In some embodiments, the antigen recognition domain of the CARs described herein comprises an antibody mimetic. The term “antibody mimetic” is intended to describe an organic compound that specifically binds a target sequence and has a structure distinct from a naturally-occurring antibody. Antibody mimetics may comprise a protein, a nucleic acid, or a small molecule. The target sequence to which an antibody mimetic of the disclosure specifically binds may be an antigen. Exemplary antibody mimetics include, but are not limited to, an affibody, an afflilin, an affimer, an affitin, an alphabody, an anticalin, an avimer (also known as avidity multimer), a DARPin (Designed Ankyrin Repeat Protein), a Fynomer, a Kunitz domain peptide, a monobody and a centyrin.

[0168] In some embodiments, CARs provided herein comprise a single chain variable fragments (scFv) derived from monoclonal antibodies specific for tumor associated antigen (e.g., CD70), with a hinge domain, a transmembrane domain, a costimulatory domain and a CD3z activation domain. Such molecules result in the transmission of a zeta signal in response to recognition by the scFv of its target. In some embodiments, the CARs provided herein are fusions of a receptor (e.g., CD27), with a hinge domain, a transmembrane domain, a costimulatory domain and a CD3z activation domain. Such molecules result in the transmission of a zeta signal in response to recognition by the receptor to its native ligand (e.g., CD70) expressed on the surface of a target cell.

[0169] Nucleic acids encoding any of the CARs described herein are also provided.

[0170] Nucleic acids encoding the CAR may be humanized. In some embodiments, the nucleic acid encoding a CAR provided herein is codon-optimized for expression in human cells. In some embodiments, the disclosure provides a full-length CAR cDNA or coding region.

[0171] In some embodiments, the antigen recognition domain of a CAR provided herein can comprise a CD27 polypeptide such as those described in WO 2012/058460, US 2018/0104337A1, US2013/0323214A1, EP 2632482, and EP 3372244, each of which is incorporated herein by reference in its entirety. Exemplary CD27 polypeptides that can be utilized as antigen recognition domains are reviewed in Starzer et al., (2020) ESMO Open, 4:e000629.

[0172] In some embodiments, the antigen recognition domain of a CAR provided herein comprises can comprise a fragment of the VH and VL chains of a single-chain variable fragment (scFv) that specifically bind CD70 or a CD27 polypeptide such as those described in U.S. Patent Appl. Publ. Nos. 2018/0230224, 2019/0233528, 2019/0233529; U.S. Pat. Nos. 8,124,738, 8,067,546, 8,562,987, 9,428,585, 9,701,752, 7,662,387, 8,535,678, 8,609,104, 8,663,642, 9,345,785, 7,641,903, 8,337,838, 8,647,624, 9,051,372, and 7,491,390; EP 1934261, EP 1871418, EP 1594542, EP 2100619, EP 2289559, EP 1799262 and EP 3583129 A1, each of which is incorporated herein by reference in its entirety. Exemplary CD70 antigen recognition domains include, but are not limited to, anti-CD70 antibodies reviewed in Starzer et al. (supra).

[0173] B. Exemplary Antigen Recognition Domains

[0174] In some embodiments, the antigen recognition domain of a CAR described herein binds (e.g., specifically binds) to CD70. The CD70-specific CAR, when expressed on the cell surface, redirects the specificity of NK cells to human CD70 (see, e.g., Accession Nos. NM 001252.5; NP 001243.1; NM 001330332.2; and NP 001317261.1).

[0175] i) Antigen Recognition Domains Comprising a CD27 Polypeptide

[0176] In some embodiments, the antigen recognition domain of a CAR provided herein comprises a CD27 polypeptide or an antigen binding fragment thereof (e.g., a fragment of CD27 that binds to CD70). Exemplary amino acid sequences of CD27 have been described (see, e.g., Accession Nos. NM_001242.4, NP_001233.1, XP_011519344.1, XM_011521042.3, XP_016875721.1, XM_017020232.1, XP_016875722, XM_017020233.2, XP_016875723, and XM_017020234.1). In some embodiments the antigen recognition domain of a CAR provided herein comprises a CD27 polypeptide sequence or an antigen binding fragment thereof as described in U.S. Patent Appl. Publ. No. 2018/0208671, incorporated herein by reference. In some embodiments, the antigen recognition domain of a CAR provided herein comprises or consists of a CD27 extracellular domain and a CD27 transmembrane domain. In some embodiments, the antigen recognition domain of a CAR provided herein comprises or consists of a CD27 signal peptide, a CD27 extracellular domain, and a CD27 transmembrane domain. In some embodiments, the antigen recognition domain of a CAR provided herein comprises or consists of a CD27 extracellular domain, and optionally comprises a signal peptide (e.g., a CD27 signal peptide).

[0177] Exemplary CD27 polypeptides of the disclosure comprises or consists of the amino acid sequence of SEQ ID NO: 6, 7, 8, 9, or 10.

[0178] In some embodiments, the antigen recognition domain comprises the CD27 signaling domain sequence comprising an amino acid sequence that is at least 90%, at least 91%, at least 92%, at least 93%, at least 94%, at least 95%, at least 96%, at least 97%, at least 98%, at least 99% or at least 100% identical to the amino acid sequence of SEQ ID NO: 7, 8, or 9. In some embodiments, the CD27 extracellular domain comprises a mutation. In some embodiments, the mutation in the CD27 extracellular domain reduces shedding of the CD27 extracellular domain.

[0179] ii) Antigen Recognition Domains Comprising an Anti-CD70 Antibody or Fragment Thereof

[0180] In some embodiments, the antigen recognition domain of a CAR provided herein comprises an antibody or an antigen-binding fragment thereof. In some embodiments, the antigen recognition domain of a CAR provided herein comprises a single chain antibody fragment (scFv) comprising a light chain variable domain (VL) and heavy chain variable domain (VH) of a monoclonal anti-CD70 antibody. Optionally, the VH and VL may be joined by a flexible linker, such as a glycine-serine linker or a Whitlow linker. In some embodiments, the scFv is humanized. In some embodiments, the antigen binding moiety may comprise VH and VL that are directionally linked, for example, from N to C terminus, VH-linker-VL or VL-linker-VH.

[0181] In some embodiments, the antigen recognition domain of a CAR provided herein comprises an scFv whose affinity for CD70 has been optimized to induce cytotoxicity of tumor cells that produce high levels of CD70 without inducing cytotoxicity of normal cell that express low or normal levels of CD70. Illustrative examples of such affinity tuning are provided in Caruso et al., (2015) Cancer Res, 75: 3505-18; and Liu et al., (2015) Cancer Res, 75: 3596-607.

[0182] In some embodiments, the antigen recognition domain of a CAR provided herein comprises a heavy chain variable domain comprising an amino acid sequence that is at least 90%, at least 91%, at least 92%, at least 93%, at least 94%, at least 95%, at least 96%, at least 97%, at least 98%, at least 99% or at least 100% identical to the amino acid sequence of any one of SEQ ID NOs:11, 21, 31, 41, 51, 61, 74, 78, 82, 92, 102, 104, 106, 108, 110, 112, 114, 116, 118, 120, 122, 124, 126, 128, 130, 132, 134, 136, 138, 140, 142, 144, 146, 148, 150, 152, 154, 156, 158, 160, 162, 164, 166, 168, 170, 172, 174, 176, 178, 180, 182, 184, 186, 188, 190, 192, 194, 694, 695, 712, 714, 716, 718, 720, 722, 724, 726, 728, 730, 732, 734, 736, 738, 740, 742, 744, 746, 748, 750, 752, 754, 756, 758, 760, 762, 764, 766, 768, 770, 772, 774, 776, 778, 780, 782, 784, 786, 788, 790, 792, 794, 796, 798, 800, 802, 804, 806, 808, 810, 812, 814, 816, 818, 820, 822, 824, 826, 828, 830, 832, 834, 836, 838, 840, 842, 844, 846, 848, 850, 852, 854, 856, 858, 860, 862, 864, 866, 868, 870, 872, 874, 876, 878, 880, 882, 884, 886, 888, 890, 892, 894, 896, 898, 900, 902, 904, 906, 908, 910, 912, 914, 916, 918, 920, 922, 924, 926, 928, 930, 932, 934, 936, 938, 940, 942, 944, 946, 948, 950, 952, 954, 956, 958, 960, 962, 964, 966, 968, 970, 972, 974, 976, 978, 980, 982, 984, 986, 988, 990, 992, 994, 996, 998, 1000, 1002, 1004, 1006, 1008, 1010, 1012, 1014, 1016, 1018, 1020, 1022, 1024, 1026, 1028, 1030, 1032, 1034, 1036, 1038, 1040, 1042, 1044, 1046, 1048, 1050, 1052, 1054, 1056, 1058, 1060, 1062, 1064, 1066, 1068, 1070, 1072, 1074, 1076, 1078, 1080, 1082, 1084, 1086, 1088, 1090, 1092, 1094, 1096, 1098, 1100, 1102, 1104, 1106, 1108, 1110, 1112, 1114, 1116, 1118, 1120, 1122, 1124, 1126, 1128, 1130, 1132, 1134, 1136, 1138, 1140, 1142, 1144, 1146, 1148, 1150, 1152, 1154, 1156, 1158, 1160, 1162, 1164, 1166 or 1168. In some embodiments, the antigen recognition domain of a CAR provided herein comprises a light chain variable domain comprising an amino acid sequence that is at least 90%, at least 91%, at least 92%, at least 93%, at least 94%, at least 95%, at least 96%, at least 97%, at least 98%, at least 99% or at least 100% identical to the amino acid sequence of any one of SEQ ID NOs: 13, 23, 33, 43, 53, 63, 66, 69, 72, 76, 80, 84, 94, 103, 105, 107, 109, 111, 113, 115, 117, 119, 121, 123, 125, 127, 129, 131, 133, 135, 137, 139, 141, 143, 145, 147, 149, 151, 153, 155, 157, 159, 161, 163, 165, 167, 169, 171, 173, 175, 177, 179, 181, 183, 185, 187, 189, 191, 193, 195, 713, 715, 717, 719, 721, 723, 725, 727, 729, 731, 733, 735, 737, 739, 741, 743, 745, 747, 749, 751, 753, 755, 757, 759, 761, 763, 765, 767, 769, 771, 773, 775, 777, 779, 781, 783, 785, 787, 789, 791, 793, 795, 797, 799, 801, 803, 805, 807, 809, 811, 813, 815, 817, 819, 821, 823, 825, 827, 829, 831, 833, 835, 837, 839, 841, 843, 845, 847, 849, 851, 853, 855, 857, 859, 861, 863, 865, 867, 869, 871, 873, 875, 877, 879, 881, 883, 885, 887, 889, 891, 893, 895, 897, 899, 901, 903, 905, 907, 909, 911, 913, 915, 917, 919, 921, 923, 925, 927, 929, 931, 933, 935, 937, 939, 941, 943, 945, 947, 949, 951, 953, 955, 957, 959, 961, 963, 965, 967, 969, 971, 973, 975, 977, 979, 981, 983, 985, 987, 989, 991, 993, 995, 997, 999, 1001, 1003, 1005, 1007, 1009, 1011, 1013, 1015, 1017, 1019, 1021, 1023, 1025, 1027, 1029, 1031, 1033, 1035, 1037, 1039, 1041, 1043, 1045, 1047, 1049, 1051, 1053, 1055, 1057, 1059, 1061, 1063, 1065, 1067, 1069, 1071, 1073, 1075, 1077, 1079, 1081, 1083, 1085, 1087, 1089, 1091, 1093, 1095, 1097, 1099, 1101, 1103, 1105, 1107, 1109, 1111, 1113, 1115, 1117, 1119, 1121, 1123, 1125, 1127, 1129, 1131, 1133, 1135, 1137, 1139, 1141, 1143, 1145, 1147, 1149, 1151, 1153, 1155, 1157, 1159, 1161, 1163, 1165, 1167 or 1169.

[0183] In some embodiments, the antigen recognition domain of a CAR provided herein comprises an amino acid sequence that is at least 90%, at least 91%, at least 92%, at least 93%, at least 94%, at least 95%, at least 96%, at least 97%, at least 98%, at least 99% or 100% identical to the amino acid sequence:

(SEQ ID NO: 2688)
QVQLVQSGAEVKKPGASVKVSCKASGYTFTNYGMNWVRQAPGQGLKWMGW
INTYTGEPTYADAFKGRVTMTRDTSISTAYMELSRLRSDDTAVYYCARDY
GDYGMDYWGQGTTVTVSSGGGGSGGGGSGGGGSGDIVMTQSPDSLAVSLG
ERATINCRASKSVSTSGYSFMHWYQQKPGQPPKLLIYLASNLESGVPDRF
SGSGSGTDFTLTISSLQAEDVAVYYCQHSREVPWTFGQGTKVEIK.

[0184] Exemplary anti-CD70 scFvs from which antigen recognition domains for use in a CAR described herein may be derived include, but are not limited to, 2H5 (MDX-1411 or MDX2H5), 10B4, 8B5, 18E7, 69A7 (MDX-1203 or MDX69A7), h1F6_VHE_VLA, h1F6_VHH_VLA, h1F6_VHJ_VLA, h1F6_VHM_VLA (SGN70 (based on vorzetuzumab)), h1F6_VHE_VLD, c1F6, 1F6-1, 2F2 and immunologically active and/or antigen-binding fragments thereof. Thus, in some embodiments, the antigen recognition domain of a CAR provided herein comprises a VH and VL derived from any one of the anti-CD70 antibodies 2H5, 10B4, 8B5, 18E7, 69A7, h1F6_VHE_VLA, h1F6_VHH_VLA, h1F6_VHJ_VLA, h1F6_VHM_VLA, h1F6_VHE_VLD, c1F6, 1F6-1, and 2F2.

[0185] In some embodiments, the antigen recognition domain of a CAR described herein comprises complementarity determining regions (CDRs) and/or a heavy chain variable domain (VH) and a light chain variable domain (VL) derived from the anti-CD70 antibody 2H5. The 2H5 antibody comprises a VH comprising the amino acid sequence of SEQ ID NO: 11, which comprises CDRH1, CDRH2, and CDRH3 comprising the amino acid sequence of SEQ ID NO: 15, 16, and 17, respectively; and a VL comprising the amino acid sequence of SEQ ID NO: 13, which comprises CDRL1, CDRL2, and CDRL3 comprising the amino acid sequence of SEQ ID NO: 18, 19, and 20, respectively.

[0186] In some embodiments, the antigen recognition domain of a CAR described herein comprises an scFv comprising a VH and a VL, wherein the VH comprises a CDRH1 of SEQ ID NO: 15, a CDRH2 of SEQ ID NO: 16, and a CDRH3 of SEQ ID NO: 17, and the VL comprises a CDRL1 of SEQ ID NO: 18, a CDRL2 of SEQ ID NO: 19, and a CDRL3 of SEQ ID NO: 20. In some embodiments, the antigen recognition domain of a CAR described herein comprising a VH and a VL, wherein the VH comprises the amino acid sequence of SEQ ID NO: 11, and the VL comprises the amino acid sequence of SEQ ID NO: 13.

[0187] In some embodiments, the antigen recognition domain of a CAR described herein comprises CDRs and/or a VH and a VL derived from the anti-CD70 antibody 10B4. The 10B4 antibody comprises a VH comprising the amino acid sequence of SEQ ID NO: 21, which comprises CDRH1, CDRH2, and CDRH3 comprising the amino acid sequence of SEQ ID NO: 25, 26, and 27, respectively; and a VL comprising the amino acid sequence of SEQ ID NO: 23, which comprises CDRL1, CDRL2, and CDRL3 comprising the amino acid sequence of SEQ ID NO: 28, 29, and 30, respectively.

[0188] In some embodiments, the antigen recognition domain of a CAR described herein comprises an scFv comprising a VH and a VL, wherein the VH comprises a CDRH1 of SEQ ID NO: 25, a CDRH2 of SEQ ID NO: 26, and a CDRH3 of SEQ ID NO: 27, and the VL comprises a CDRL1 of SEQ ID NO: 28, a CDRL2 of SEQ ID NO: 29, and a CDRL3 of SEQ ID NO: 30. In some embodiments, the antigen recognition domain of a CAR described herein comprises a VH and a VL, wherein the VH comprises the amino acid sequence of SEQ ID NO: 21, and the VL comprises the amino acid sequence of SEQ ID NO: 23.

[0189] In some embodiments, the antigen recognition domain of a CAR described herein comprises CDRs and/or a VH and a VL derived from the anti-CD70 antibody 8B5. The 8B5 antibody comprises a VH comprising the amino acid sequence of SEQ ID NO: 31, which comprises CDRH1, CDRH2, and CDRH3 comprising the amino acid sequence of SEQ ID NO: 35, 36, and 37, respectively; and a VL comprising the amino acid sequence of SEQ ID NO: 33, which comprises CDRL1, CDRL2, and CDRL3 comprising the amino acid sequence of SEQ ID NO: 38, 39, and 40, respectively.

[0190] In some embodiments, the antigen recognition domain of a CAR described herein comprises an scFv comprising a VH and a VL, wherein the VH comprises a CDRH1 of SEQ ID NO: 35, a CDRH2 of SEQ ID NO: 36, and a CDRH3 of SEQ ID NO: 37, and the VL comprises a CDRL1 of SEQ ID NO: 38, a CDRL2 of SEQ ID NO: 39, and a CDRL3 of SEQ ID NO: 40. In some embodiments, the antigen recognition domain of a CAR described herein comprises a VH and a VL, wherein the VH comprises the amino acid sequence of SEQ ID NO: 31, and the VL comprises the amino acid sequence of SEQ ID NO: 33.

[0191] In some embodiments, the antigen recognition domain of a CAR described herein comprises CDRs and/or a VH and a VL derived from the anti-CD70 antibody 18E7. The 18E7 antibody comprises a VH comprising the amino acid sequence of SEQ ID NO: 41, which comprises CDRH1, CDRH2, and CDRH3 comprising the amino acid sequence of SEQ ID NO: 45, 46, and 47, respectively; and a VL comprising the amino acid sequence of SEQ ID NO: 43, which comprises CDRL1, CDRL2, and CDRL3 comprising the amino acid sequence of SEQ ID NO: 48, 49, and 50, respectively.

[0192] In some embodiments, the antigen recognition domain of a CAR described herein comprises an scFv comprising a VH and a VL, wherein the VH comprises a CDRH1 of SEQ ID NO: 45, a CDRH2 of SEQ ID NO: 46, and a CDRH3 of SEQ ID NO: 47, and the VL comprises a CDRL1 of SEQ ID NO: 48, a CDRL2 of SEQ ID NO: 49, and a CDRL3 of SEQ ID NO: 50. In some embodiments, the antigen recognition domain of a CAR described herein comprises a VH and a VL, wherein the VH comprises the amino acid sequence of SEQ ID NO: 41, and the VL comprises the amino acid sequence of SEQ ID NO: 43.

[0193] In some embodiments, the antigen recognition domain of a CAR described herein comprises CDRs and/or a VH and a VL derived from the anti-CD70 antibody 69A7. The 69A7 antibody comprises a VH comprising the amino acid sequence of SEQ ID NO: 51, which comprises CDRH1, CDRH2, and CDRH3 comprising the amino acid sequence of SEQ ID NO: 55, 56, and 57, respectively; and a VL comprising the amino acid sequence of SEQ ID NO: 53, which comprises CDRL1, CDRL2, and CDRL3 comprising the amino acid sequence of SEQ ID NO: 58, 59, and 60, respectively.

[0194] In some embodiments, the antigen recognition domain of a CAR described herein comprises an scFv comprising a VH and a VL, wherein the VH comprises a CDRH1 of SEQ ID NO: 55, a CDRH2 of SEQ ID NO: 56, and a CDRH3 of SEQ ID NO: 57, and the VL comprises a CDRL1 of SEQ ID NO: 58, a CDRL2 of SEQ ID NO: 59, and a CDRL3 of SEQ ID NO: 60. In some embodiments, the antigen recognition domain of a CAR described herein comprises a VH and a VL, wherein the VH comprises the amino acid sequence of SEQ ID NO: 51, and the VL comprises the amino acid sequence of SEQ ID NO: 53.

[0195] In some embodiments, the antigen recognition domain of a CAR described herein comprises CDRs and/or a VH and a VL derived from the anti-CD70 antibody h1F6_VHE_VLA. The h1F6_VHE_VLA antibody comprises a VH comprising the amino acid sequence of SEQ ID NO: 61, and a VL comprising the amino acid sequence of SEQ ID NO: 63

[0196] In some embodiments, the antigen recognition domain of a CAR described herein comprises a VH and a VL, wherein the VH comprises the amino acid sequence of SEQ ID NO: 61, and the VL comprises the amino acid sequence of SEQ ID NO: 63.

[0197] In some embodiments, the antigen recognition domain of a CAR described herein comprises CDRs and/or a VH and a VL derived from the anti-CD70 antibody h1F6_VHH_VLA. The h1F6_VHH_VLA antibody comprises a VH comprising the amino acid sequence of SEQ ID NO: 693, and a VL comprising the amino acid sequence of SEQ ID NO: 66.

[0198] In some embodiments, the antigen recognition domain of a CAR described herein comprises a VH and a VL, wherein the VH comprises the amino acid sequence of SEQ ID NO: 693, and the VL comprises the amino acid sequence of SEQ ID NO: 66.

[0199] In some embodiments, the antigen recognition domain of a CAR described herein comprises CDRs and/or a VH and a VL derived from the anti-CD70 antibody h1F6_VHJ_VLA. The h1F6_VHJ_VLA antibody comprises a VH comprising the amino acid sequence of SEQ ID NO: 694, which comprises CDRH1, CDRH2, and CDRH3 comprising the amino acid sequence of SEQ ID NO: 2672, 2673, and 2674, respectively; and aVL comprising the amino acid sequence of SEQ ID NO: 69, which comprises CDRL1, CDRL2, and CDRL3 comprising the amino acid sequence of SEQ ID NO: 2675, 2676, and 2677, respectively.

[0200] In some embodiments, the antigen recognition domain of a CAR described herein comprises an scFv comprising a VH and a VL, wherein the VH comprises a CDRH1 of SEQ ID NO: 2672, a CDRH2 of SEQ ID NO: 2673, and a CDRH3 of SEQ ID NO: 2674, and the VL comprises a CDRL1 of SEQ ID NO: 2675, a CDRL2 of SEQ ID NO: 2676, and a CDRL3 of SEQ ID NO: 2677. In some embodiments, the antigen recognition domain of a CAR described herein comprises a VH and a VL, wherein the VH comprises the amino acid sequence of SEQ ID NO: 694, and the VL comprises the amino acid sequence of SEQ ID NO: 69.

[0201] In some embodiments, the antigen recognition domain of a CAR described herein comprises CDRs and/or a VH and VL derived from the anti-CD70 antibody h1F6_VHM_VLA. The h1F6_VHM_VLA antibody comprises a VH comprising the amino acid sequence of SEQ ID NO: 695, and a VL comprising the amino acid sequence of SEQ ID NO: 72.

[0202] In some embodiments, the antigen recognition domain of a CAR described herein comprises a VH and a VL, wherein the VH comprises the amino acid sequence of SEQ ID NO: 695, and the VL comprises the amino acid sequence of SEQ ID NO: 72.

[0203] In some embodiments, the antigen recognition domain of a CAR described herein comprises CDRs and/or a VH and a VL derived from the anti-CD70 antibody h1F6_VHD_VLA. The h1F6_VHD_VLA antibody comprises a VH comprising the amino acid sequence of SEQ ID NO: 74, and a VL comprising the amino acid sequence of SEQ ID NO: 76.

[0204] In some embodiments, the antigen recognition domain of a CAR described herein comprises a VH and a VL, wherein the VH comprises the amino acid sequence of SEQ ID NO: 74, and the VL comprises the amino acid sequence of SEQ ID NO: 76.

[0205] In some embodiments, the antigen recognition domain of a CAR described herein comprises CDRs and/or a VH and a VL derived from the anti-CD70 antibody c1F6. The c1F6 antibody comprises a VH comprising the amino acid sequence of SEQ ID NO: 78, and a VL comprising the amino acid sequence of SEQ ID NO: 80.

[0206] In some embodiments, the antigen recognition domain of a CAR described herein comprises a VH and a VL, wherein the VH comprises the amino acid sequence of SEQ ID NO: 78, and the VL comprises the amino acid sequence of SEQ ID NO: 80.

[0207] In some embodiments, the antigen recognition domain of a CAR described herein comprises CDRs and/or a VH and a VL derived from the anti-CD70 antibody 1F6_1. The 1F6_1 antibody comprises a VH comprising the amino acid sequence of SEQ ID NO: 82, which comprises CDRH1, CDRH2, and CDRH3 comprising the amino acid sequence of SEQ ID NO: 86, 87, and 88, respectively; and a VL comprising the amino acid sequence of SEQ ID NO: 84, which comprises CDRL1, CDRL2, and CDRL3 comprising the amino acid sequence of SEQ ID NO: 89, 90, and 91, respectively.

[0208] In some embodiments, the antigen recognition domain of a CAR described herein comprises an scFv comprising a VH and a VL, wherein the VH comprises a CDRH1 of SEQ ID NO: 86, a CDRH2 of SEQ ID NO: 87, and a CDRH3 of SEQ ID NO: 88, and the VL comprises a CDRL1 of SEQ ID NO: 89, a CDRL2 of SEQ ID NO: 90, and a CDRL3 of SEQ ID NO: 91. In some embodiments, the antigen recognition domain of a CAR described herein comprises a VH and a VL, wherein the VH comprises the amino acid sequence of SEQ ID NO: 82, and the VL comprises the amino acid sequence of SEQ ID NO: 84.

[0209] In some embodiments, the antigen recognition domain of a CAR described herein comprises CDRs and/or a VH and a VL derived from the anti-CD70 antibody 2F2. The 2F2 antibody comprises a VH comprising the amino acid sequence of SEQ ID NO: 92, which comprises CDRH1, CDRH2, and CDRH3 comprising the amino acid sequence of SEQ ID NO: 96, 97, and 98, respectively; and a VL comprising the amino acid sequence of SEQ ID NO: 94, which comprises CDRL1, CDRL2, and CDRL3 comprising the amino acid sequence of SEQ ID NO: 99, 100, and 101, respectively.

[0210] In some embodiments, the antigen recognition domain of a CAR described herein comprises an scFv comprising a VH and a VL, wherein the VH comprises a CDRH1 of SEQ ID NO: 96, a CDRH2 of SEQ ID NO: 97, and a CDRH3 of SEQ ID NO: 98, and the VL comprises a CDRL1 of SEQ ID NO: 99, a CDRL2 of SEQ ID NO: 100, and a CDRL3 of SEQ ID NO: 101. In some embodiments, the antigen recognition domain of a CAR described herein comprises a VH and a VL, wherein the VH comprises the amino acid sequence of SEQ ID NO: 92, and the VL comprises the amino acid sequence of SEQ ID NO: 94.

[0211] The antigen recognition domain of the CARs provided herein may include CDRs and/or VH and VL derived from an anti-CD70 antibody (or antigen binding fragment thereof). Exemplary anti-CD70 scFvs include but are not limited to 8G1, 1C8, 6E9, 31H1, 63B2, 40E3, 42C3, 45F11, 64F9, 72C2, 2F10, 4F11, 10H10, 17G6, 65E11, PO2B10, P07D03, P08A02, P08E02, P08F08, P08G02, P12B09, P12F02, P12G07, P13F04, P15D02, P16C05, 10A1, 10E2, 11A1, 11C1, 11D1, 11E1, 12A2, 12C4, 12C5, 12D3, 12D6, 12D7, 12F5, 12H4, 8C8, 8F7, 8F8, 9D8, 9E10, 9E5, 9F4, 9F8, 12C6, CD70-1, CD70-2, CD70-3, CD70-4, CD70-5, CD70-6, CD70-7, CD70-8, CD70-9, CD70-10, CD70-11, CD70-12, CD70-13, CD70-14, CD70-15, CD70-16, CD70-17, CD70-18, CD70-19, CD70-20, CD70-21, CD70-22, CD70-23, CD70-24, CD70-25, CD70-26, CD70-27, CD70-28, CD70-29, CD70-30, CD70-31, CD70-32, CD70-33, CD70-34, CD70-35, CD70-36, CD70-37, CD70-38, CD70-39, CD70-40, CD70-41, CD70-42, CD70-43, CD70-44, CD70-45, CD70-46, CD70-47, CD70-48, CD70-49, CD70-50, CD70-51, CD70-52, CD70-53, CD70-54, CD70-55, CD70-56, CD70-57, CD70-58, CD70-59, CD70-60, CD70-61, CD70-62, CD70-63, CD70-64, CD70-65, CD70-66, CD70-67, CD70-68, CD70-69, CD70-70, CD70-71, CD70-72, CD70-73, CD70-74, CD70-75, CD70-76, CD70-77, CD70-78, CD70-79, CD70-80, CD70-81, CD70-82, CD70-83, CD70-84, CD70-85, CD70-86, CD70-87, CD70-88, CD70-89, CD70-90, CD70-91, CD70-92, CD70-93, CD70-94, CD70-95, CD70-96, CD70-97, CD70-98, CD70-99, CD70-100, CD70-101, CD70-102, CD70-103, CD70-104, CD70-105, CD70-106, CD70-107, CD70-108, CD70-109, CD70-110, CD70-111, CD70-112, CD70-113, CD70-114, CD70-115, CD70-116, CD70-117, CD70-118, CD70-119, CD70-120, CD70-121, CD70-122, CD70-123, CD70-124, CD70-125, CD70-126, CD70-127, CD70-128, CD70-129, CD70-130, CD70-131, CD70-132, CD70-133, CD70-134, CD70-135, CD70-136, CD70-137, CD70-138, CD70-139, CD70-140, CD70-141, CD70-142, CD70-143, CD70-144, CD70-145, CD70-146, CD70-147, CD70-148, CD70-149, CD70-150, CD70-151, CD70-152, CD70-153, CD70-154, CD70-155, CD70-156, CD70-157, CD70-158, CD70-159, CD70-160, CD70-161, CD70-162, CD70-163, CD70-164, CD70-165, CD70-166, CD70-167, CD70-168, CD70-169, CD70-170, CD70-171, CD70-172, CD70-173, CD70-174, CD70-175, CD70-176, CD70-177, CD70-178, CD70-179, CD70-180, 1C2, 9D1, 8B12, 8C12, 9E1, 5F4, 5B2, 6D5, 4D2, 9A1, 9G2, 9B2, 24E3, 33D8, 24F2, 24B6, 19G10, 45B12, 45D9, 45F8, 45A12, 45B6, 57B6, 59D10, 27B3, 36A9, 53F1, 36D6, 53G1, 35G3, 53C1, 35F6, 36G2, 39D5, 42D12, 35C1, 41D12, 41H8, 35G2, 40F1, 53B1, 39C3, 53D1, 53H1, 53A2, cusatuzumab (ARGX-110), CTX-130, CTX-130, 4SCAR70, MDX-1411, SGN70, and immunologically active and/or antigen-binding fragments thereof. Anti-CD70 antibodies of the disclosure can comprise any one of the partial light chain sequences as listed in Table 1 and/or any one of partial heavy chain sequences as listed in Table 1. In some embodiments, the antigen recognition domain of a CAR described herein comprises an scFv comprising a VH and a VL, wherein the VH comprises the amino acid sequence of a VH from an anti-CD70 antibody listed in Table 1, and the VL comprises the amino acid sequence of the corresponding VL from the antibody listed in Table 1.

TABLE 1
Exemplary anti-CD70 antibodies - heavy
chain and light chain variable domains

| | heavy chain variable | light chain variable |
|---|---|---|
| Antibody ID | domain (VH) | domain (VL) |
| 31H1 | SEQ ID NO: 102 | SEQ ID NO: 103 |
| 63B2 | SEQ ID NO: 104 | SEQ ID NO: 105 |
| 40E3 | SEQ ID NO: 106 | SEQ ID NO: 107 |
| 42C3 | SEQ ID NO: 108 | SEQ ID NO: 109 |
| 45F11 | SEQ ID NO: 110 | SEQ ID NO: 111 |
| 64F9 | SEQ ID NO: 112 | SEQ ID NO: 113 |
| 72C2 | SEQ ID NO: 114 | SEQ ID NO: 115 |
| 2F10 | SEQ ID NO: 116 | SEQ ID NO: 117 |
| 4F11 | SEQ ID NO: 118 | SEQ ID NO: 119 |
| 10H10 | SEQ ID NO: 120 | SEQ ID NO: 121 |
| 17G6 | SEQ ID NO: 122 | SEQ ID NO: 123 |
| 65E11 | SEQ ID NO: 124 | SEQ ID NO: 125 |
| P02B10 | SEQ ID NO: 126 | SEQ ID NO: 127 |
| P07D03 | SEQ ID NO: 128 | SEQ ID NO: 129 |
| P08A02 | SEQ ID NO: 130 | SEQ ID NO: 131 |
| P08E02 | SEQ ID NO: 132 | SEQ ID NO: 133 |
| P08F08 | SEQ ID NO: 134 | SEQ ID NO: 135 |
| P08G02 | SEQ ID NO: 136 | SEQ ID NO: 137 |
| P12B09 | SEQ ID NO: 138 | SEQ ID NO: 139 |
| P12F02 | SEQ ID NO: 140 | SEQ ID NO: 141 |
| P12G07 | SEQ ID NO: 142 | SEQ ID NO: 143 |
| P13F04 | SEQ ID NO: 144 | SEQ ID NO: 145 |
| P15D02 | SEQ ID NO: 146 | SEQ ID NO: 147 |
| P16C05 | SEQ ID NO: 148 | SEQ ID NO: 149 |
| 10A1 | SEQ ID NO: 150 | SEQ ID NO: 151 |
| 10E2 | SEQ ID NO: 152 | SEQ ID NO: 153 |
| 11A1 | SEQ ID NO: 154 | SEQ ID NO: 155 |
| 11C1 | SEQ ID NO: 156 | SEQ ID NO: 157 |
| 11D1 | SEQ ID NO: 158 | SEQ ID NO: 159 |
| 11E1 | SEQ ID NO: 160 | SEQ ID NO: 161 |
| 12A2 | SEQ ID NO: 162 | SEQ ID NO: 163 |
| 12C4 | SEQ ID NO: 164 | SEQ ID NO: 165 |
| 12C5 | SEQ ID NO: 166 | SEQ ID NO: 167 |
| 12D3 | SEQ ID NO: 168 | SEQ ID NO: 169 |
| 12D6 | SEQ ID NO: 170 | SEQ ID NO: 171 |
| 12D7 | SEQ ID NO: 172 | SEQ ID NO: 173 |
| 12F5 | SEQ ID NO: 174 | SEQ ID NO: 175 |
| 12H4 | SEQ ID NO: 176 | SEQ ID NO: 177 |
| 8C8 | SEQ ID NO: 178 | SEQ ID NO: 179 |
| 8F7 | SEQ ID NO: 180 | SEQ ID NO: 181 |
| 8F8 | SEQ ID NO: 182 | SEQ ID NO: 183 |
| 9D8 | SEQ ID NO: 184 | SEQ ID NO: 185 |
| 9E10 | SEQ ID NO: 186 | SEQ ID NO: 187 |
| 9E5 | SEQ ID NO: 188 | SEQ ID NO: 189 |
| 9F4 | SEQ ID NO: 190 | SEQ ID NO: 191 |
| 9F8 | SEQ ID NO: 192 | SEQ ID NO: 193 |
| 12C6 | SEQ ID NO: 194 | SEQ ID NO: 195 |
| CD70-1 | SEQ ID NO: 712 | SEQ ID NO: 713 |
| CD70-2 | SEQ ID NO: 714 | SEQ ID NO: 715 |
| CD70-3 | SEQ ID NO: 716 | SEQ ID NO: 717 |
| CD70-4 | SEQ ID NO: 718 | SEQ ID NO: 719 |
| CD70-5 | SEQ ID NO: 720 | SEQ ID NO: 721 |
| CD70-6 | SEQ ID NO: 722 | SEQ ID NO: 723 |
| CD70-7 | SEQ ID NO: 724 | SEQ ID NO: 725 |
| CD70-8 | SEQ ID NO: 726 | SEQ ID NO: 727 |
| CD70-9 | SEQ ID NO: 728 | SEQ ID NO: 729 |
| CD70-10 | SEQ ID NO: 730 | SEQ ID NO: 731 |
| CD70-11 | SEQ ID NO: 732 | SEQ ID NO: 733 |
| CD70-12 | SEQ ID NO: 734 | SEQ ID NO: 735 |
| CD70-13 | SEQ ID NO: 736 | SEQ ID NO: 737 |
| CD70-14 | SEQ ID NO: 738 | SEQ ID NO: 739 |
| CD70-15 | SEQ ID NO: 740 | SEQ ID NO: 741 |
| CD70-16 | SEQ ID NO: 742 | SEQ ID NO: 743 |
| CD70-17 | SEQ ID NO: 744 | SEQ ID NO: 745 |
| CD70-18 | SEQ ID NO: 746 | SEQ ID NO: 747 |
| CD70-19 | SEQ ID NO: 748 | SEQ ID NO: 749 |
| CD70-20 | SEQ ID NO: 750 | SEQ ID NO: 751 |
| CD70-21 | SEQ ID NO: 752 | SEQ ID NO: 753 |
| CD70-22 | SEQ ID NO: 754 | SEQ ID NO: 755 |
| CD70-23 | SEQ ID NO: 756 | SEQ ID NO: 757 |
| CD70-24 | SEQ ID NO: 758 | SEQ ID NO: 759 |
| CD70-25 | SEQ ID NO: 760 | SEQ ID NO: 761 |
| CD70-26 | SEQ ID NO: 762 | SEQ ID NO: 763 |
| CD70-27 | SEQ ID NO: 764 | SEQ ID NO: 765 |
| CD70-28 | SEQ ID NO: 766 | SEQ ID NO: 767 |
| CD70-29 | SEQ ID NO: 768 | SEQ ID NO: 769 |
| CD70-30 | SEQ ID NO: 770 | SEQ ID NO: 771 |
| CD70-31 | SEQ ID NO: 772 | SEQ ID NO: 773 |
| CD70-32 | SEQ ID NO: 774 | SEQ ID NO: 775 |
| CD70-33 | SEQ ID NO: 776 | SEQ ID NO: 777 |
| CD70-34 | SEQ ID NO: 778 | SEQ ID NO: 779 |
| CD70-35 | SEQ ID NO: 780 | SEQ ID NO: 781 |
| CD70-36 | SEQ ID NO: 782 | SEQ ID NO: 783 |
| CD70-37 | SEQ ID NO: 784 | SEQ ID NO: 785 |
| CD70-38 | SEQ ID NO: 786 | SEQ ID NO: 787 |
| CD70-39 | SEQ ID NO: 788 | SEQ ID NO: 789 |
| CD70-40 | SEQ ID NO: 790 | SEQ ID NO: 791 |
| CD70-41 | SEQ ID NO: 792 | SEQ ID NO: 793 |
| CD70-42 | SEQ ID NO: 794 | SEQ ID NO: 795 |
| CD70-43 | SEQ ID NO: 796 | SEQ ID NO: 797 |
| CD70-44 | SEQ ID NO: 798 | SEQ ID NO: 799 |
| CD70-45 | SEQ ID NO: 800 | SEQ ID NO: 801 |
| CD70-46 | SEQ ID NO: 802 | SEQ ID NO: 803 |
| CD70-47 | SEQ ID NO: 804 | SEQ ID NO: 805 |
| CD70-48 | SEQ ID NO: 806 | SEQ ID NO: 807 |
| CD70-49 | SEQ ID NO: 808 | SEQ ID NO: 809 |
| CD70-50 | SEQ ID NO: 810 | SEQ ID NO: 811 |
| CD70-51 | SEQ ID NO: 812 | SEQ ID NO: 813 |
| CD70-52 | SEQ ID NO: 814 | SEQ ID NO: 815 |
| CD70-53 | SEQ ID NO: 816 | SEQ ID NO: 817 |
| CD70-54 | SEQ ID NO: 818 | SEQ ID NO: 819 |
| CD70-55 | SEQ ID NO: 820 | SEQ ID NO: 821 |
| CD70-56 | SEQ ID NO: 822 | SEQ ID NO: 823 |
| CD70-57 | SEQ ID NO: 824 | SEQ ID NO: 825 |
| CD70-58 | SEQ ID NO: 826 | SEQ ID NO: 827 |
| CD70-59 | SEQ ID NO: 828 | SEQ ID NO: 829 |
| CD70-60 | SEQ ID NO: 830 | SEQ ID NO: 831 |
| CD70-61 | SEQ ID NO: 832 | SEQ ID NO: 833 |
| CD70-62 | SEQ ID NO: 834 | SEQ ID NO: 835 |
| CD70-63 | SEQ ID NO: 836 | SEQ ID NO: 837 |
| CD70-64 | SEQ ID NO: 838 | SEQ ID NO: 839 |
| CD70-65 | SEQ ID NO: 840 | SEQ ID NO: 841 |
| CD70-66 | SEQ ID NO: 842 | SEQ ID NO: 843 |
| CD70-67 | SEQ ID NO: 844 | SEQ ID NO: 845 |
| CD70-68 | SEQ ID NO: 846 | SEQ ID NO: 847 |
| CD70-69 | SEQ ID NO: 848 | SEQ ID NO: 849 |
| CD70-70 | SEQ ID NO: 850 | SEQ ID NO: 851 |
| CD70-71 | SEQ ID NO: 852 | SEQ ID NO: 853 |
| CD70-72 | SEQ ID NO: 854 | SEQ ID NO: 855 |
| CD70-73 | SEQ ID NO: 856 | SEQ ID NO: 857 |
| CD70-74 | SEQ ID NO: 858 | SEQ ID NO: 859 |
| CD70-75 | SEQ ID NO: 860 | SEQ ID NO: 861 |
| CD70-76 | SEQ ID NO: 862 | SEQ ID NO: 863 |
| CD70-77 | SEQ ID NO: 864 | SEQ ID NO: 865 |
| CD70-78 | SEQ ID NO: 866 | SEQ ID NO: 867 |
| CD70-79 | SEQ ID NO: 868 | SEQ ID NO: 869 |
| CD70-80 | SEQ ID NO: 870 | SEQ ID NO: 871 |
| CD70-81 | SEQ ID NO: 872 | SEQ ID NO: 873 |
| CD70-82 | SEQ ID NO: 874 | SEQ ID NO: 875 |
| CD70-83 | SEQ ID NO: 876 | SEQ ID NO: 877 |
| CD70-84 | SEQ ID NO: 878 | SEQ ID NO: 879 |
| CD70-85 | SEQ ID NO: 880 | SEQ ID NO: 881 |
| CD70-86 | SEQ ID NO: 882 | SEQ ID NO: 883 |
| CD70-87 | SEQ ID NO: 884 | SEQ ID NO: 885 |
| CD70-88 | SEQ ID NO: 886 | SEQ ID NO: 887 |
| CD70-89 | SEQ ID NO: 888 | SEQ ID NO: 889 |
| CD70-90 | SEQ ID NO: 890 | SEQ ID NO: 891 |
| CD70-91 | SEQ ID NO: 892 | SEQ ID NO: 893 |
| CD70-92 | SEQ ID NO: 894 | SEQ ID NO: 895 |
| CD70-93 | SEQ ID NO: 896 | SEQ ID NO: 897 |
| CD70-94 | SEQ ID NO: 898 | SEQ ID NO: 899 |
| CD70-95 | SEQ ID NO: 900 | SEQ ID NO: 901 |
| CD70-96 | SEQ ID NO: 902 | SEQ ID NO: 903 |
| CD70-97 | SEQ ID NO: 904 | SEQ ID NO: 905 |
| CD70-98 | SEQ ID NO: 906 | SEQ ID NO: 907 |
| CD70-99 | SEQ ID NO: 908 | SEQ ID NO: 909 |
| CD70-100 | SEQ ID NO: 910 | SEQ ID NO: 911 |
| CD70-101 | SEQ ID NO: 912 | SEQ ID NO: 913 |
| CD70-102 | SEQ ID NO: 914 | SEQ ID NO: 915 |
| CD70-103 | SEQ ID NO: 916 | SEQ ID NO: 917 |
| CD70-104 | SEQ ID NO: 918 | SEQ ID NO: 919 |
| CD70-105 | SEQ ID NO: 920 | SEQ ID NO: 921 |
| CD70-106 | SEQ ID NO: 922 | SEQ ID NO: 923 |
| CD70-107 | SEQ ID NO: 924 | SEQ ID NO: 925 |
| CD70-108 | SEQ ID NO: 926 | SEQ ID NO: 927 |
| CD70-109 | SEQ ID NO: 928 | SEQ ID NO: 929 |
| CD70-110 | SEQ ID NO: 930 | SEQ ID NO: 931 |
| CD70-111 | SEQ ID NO: 932 | SEQ ID NO: 933 |
| CD70-112 | SEQ ID NO: 934 | SEQ ID NO: 935 |
| CD70-113 | SEQ ID NO: 936 | SEQ ID NO: 937 |
| CD70-114 | SEQ ID NO: 938 | SEQ ID NO: 939 |
| CD70-115 | SEQ ID NO: 940 | SEQ ID NO: 941 |
| CD70-116 | SEQ ID NO: 942 | SEQ ID NO: 943 |
| CD70-117 | SEQ ID NO: 944 | SEQ ID NO: 945 |
| CD70-118 | SEQ ID NO: 946 | SEQ ID NO: 947 |
| CD70-119 | SEQ ID NO: 948 | SEQ ID NO: 949 |
| CD70-120 | SEQ ID NO: 950 | SEQ ID NO: 951 |
| CD70-121 | SEQ ID NO: 952 | SEQ ID NO: 953 |
| CD70-122 | SEQ ID NO: 954 | SEQ ID NO: 955 |
| CD70-123 | SEQ ID NO: 956 | SEQ ID NO: 957 |
| CD70-124 | SEQ ID NO: 958 | SEQ ID NO: 959 |
| CD70-125 | SEQ ID NO: 960 | SEQ ID NO: 961 |
| CD70-126 | SEQ ID NO: 962 | SEQ ID NO: 963 |
| CD70-127 | SEQ ID NO: 964 | SEQ ID NO: 965 |
| CD70-128 | SEQ ID NO: 966 | SEQ ID NO: 967 |
| CD70-129 | SEQ ID NO: 968 | SEQ ID NO: 969 |
| CD70-130 | SEQ ID NO: 970 | SEQ ID NO: 971 |
| CD70-131 | SEQ ID NO: 972 | SEQ ID NO: 973 |
| CD70-132 | SEQ ID NO: 974 | SEQ ID NO: 975 |
| CD70-133 | SEQ ID NO: 976 | SEQ ID NO: 977 |
| CD70-134 | SEQ ID NO: 978 | SEQ ID NO: 979 |
| CD70-135 | SEQ ID NO: 980 | SEQ ID NO: 981 |
| CD70-136 | SEQ ID NO: 982 | SEQ ID NO: 983 |
| CD70-137 | SEQ ID NO: 984 | SEQ ID NO: 985 |
| CD70-138 | SEQ ID NO: 986 | SEQ ID NO: 987 |
| CD70-139 | SEQ ID NO: 988 | SEQ ID NO: 989 |
| CD70-140 | SEQ ID NO: 990 | SEQ ID NO: 991 |
| CD70-141 | SEQ ID NO: 992 | SEQ ID NO: 993 |
| CD70-142 | SEQ ID NO: 994 | SEQ ID NO: 995 |
| CD70-143 | SEQ ID NO: 996 | SEQ ID NO: 997 |
| CD70-144 | SEQ ID NO: 998 | SEQ ID NO: 999 |
| CD70-145 | SEQ ID NO: 1000 | SEQ ID NO: 1001 |
| CD70-146 | SEQ ID NO: 1002 | SEQ ID NO: 1003 |
| CD70-147 | SEQ ID NO: 1004 | SEQ ID NO: 1005 |
| CD70-148 | SEQ ID NO: 1006 | SEQ ID NO: 1007 |
| CD70-149 | SEQ ID NO: 1008 | SEQ ID NO: 1009 |
| CD70-150 | SEQ ID NO: 1010 | SEQ ID NO: 1011 |
| CD70-151 | SEQ ID NO: 1012 | SEQ ID NO: 1013 |
| CD70-152 | SEQ ID NO: 1014 | SEQ ID NO: 1015 |
| CD70-153 | SEQ ID NO: 1016 | SEQ ID NO: 1017 |
| CD70-154 | SEQ ID NO: 1018 | SEQ ID NO: 1019 |
| CD70-155 | SEQ ID NO: 1020 | SEQ ID NO: 1021 |
| CD70-156 | SEQ ID NO: 1022 | SEQ ID NO: 1023 |
| CD70-157 | SEQ ID NO: 1024 | SEQ ID NO: 1025 |
| CD70-158 | SEQ ID NO: 1026 | SEQ ID NO: 1027 |
| CD70-159 | SEQ ID NO: 1028 | SEQ ID NO: 1029 |
| CD70-160 | SEQ ID NO: 1030 | SEQ ID NO: 1031 |
| CD70-161 | SEQ ID NO: 1032 | SEQ ID NO: 1033 |
| CD70-162 | SEQ ID NO: 1034 | SEQ ID NO: 1035 |
| CD70-163 | SEQ ID NO: 1036 | SEQ ID NO: 1037 |
| CD70-164 | SEQ ID NO: 1038 | SEQ ID NO: 1039 |
| CD70-165 | SEQ ID NO: 1040 | SEQ ID NO: 1041 |
| CD70-166 | SEQ ID NO: 1042 | SEQ ID NO: 1043 |
| CD70-167 | SEQ ID NO: 1044 | SEQ ID NO: 1045 |
| CD70-168 | SEQ ID NO: 1046 | SEQ ID NO: 1047 |
| CD70-169 | SEQ ID NO: 1048 | SEQ ID NO: 1049 |
| CD70-170 | SEQ ID NO: 1050 | SEQ ID NO: 1051 |
| CD70-171 | SEQ ID NO: 1052 | SEQ ID NO: 1053 |
| CD70-172 | SEQ ID NO: 1054 | SEQ ID NO: 1055 |
| CD70-173 | SEQ ID NO: 1056 | SEQ ID NO: 1057 |
| CD70-174 | SEQ ID NO: 1058 | SEQ ID NO: 1059 |
| CD70-175 | SEQ ID NO: 1060 | SEQ ID NO: 1061 |
| CD70-176 | SEQ ID NO: 1062 | SEQ ID NO: 1063 |
| CD70-177 | SEQ ID NO: 1064 | SEQ ID NO: 1065 |
| CD70-178 | SEQ ID NO: 1066 | SEQ ID NO: 1067 |
| CD70-179 | SEQ ID NO: 1068 | SEQ ID NO: 1069 |
| CD70-180 | SEQ ID NO: 1070 | SEQ ID NO: 1071 |
| 1C2 | SEQ ID NO: 1072 | SEQ ID NO: 1073 |
| 9D1 | SEQ ID NO: 1074 | SEQ ID NO: 1075 |
| 8B12 | SEQ ID NO: 1076 | SEQ ID NO: 1077 |
| 8C12 | SEQ ID NO: 1078 | SEQ ID NO: 1079 |
| 9E1 | SEQ ID NO: 1080 | SEQ ID NO: 1081 |
| 5F4 | SEQ ID NO: 1082 | SEQ ID NO: 1083 |
| 5B2 | SEQ ID NO: 1084 | SEQ ID NO: 1085 |
| 6D5 | SEQ ID NO: 1086 | SEQ ID NO: 1087 |
| 4D2 | SEQ ID NO: 1088 | SEQ ID NO: 1089 |
| 9A1 | SEQ ID NO: 1090 | SEQ ID NO: 1091 |
| 9G2 | SEQ ID NO: 1092 | SEQ ID NO: 1093 |
| 9B2 | SEQ ID NO: 1094 | SEQ ID NO: 1095 |
| 24E3 | SEQ ID NO: 1096 | SEQ ID NO: 1097 |
| 33D8 | SEQ ID NO: 1098 | SEQ ID NO: 1099 |
| 24F2 | SEQ ID NO: 1100 | SEQ ID NO: 1101 |
| 24B6 | SEQ ID NO: 1102 | SEQ ID NO: 1103 |
| 19G10 | SEQ ID NO: 1104 | SEQ ID NO: 1105 |
| 45B12 | SEQ ID NO: 1106 | SEQ ID NO: 1107 |
| 45D9 | SEQ ID NO: 1108 | SEQ ID NO: 1109 |
| 45F8 | SEQ ID NO: 1110 | SEQ ID NO: 1111 |
| 45A12 | SEQ ID NO: 1112 | SEQ ID NO: 1113 |
| 45B6 | SEQ ID NO: 1114 | SEQ ID NO: 1115 |
| 57B6 | SEQ ID NO: 1116 | SEQ ID NO: 1117 |
| 59D10 | SEQ ID NO: 1118 | SEQ ID NO: 1119 |
| 27B3 | SEQ ID NO: 1120 | SEQ ID NO: 1121 |
| 36A9 | SEQ ID NO: 1122 | SEQ ID NO: 1123 |
| 53F1 | SEQ ID NO: 1124 | SEQ ID NO: 1125 |
| 36D6 | SEQ ID NO: 1126 | SEQ ID NO: 1127 |
| 53G1 | SEQ ID NO: 1128 | SEQ ID NO: 1129 |
| 35G3 | SEQ ID NO: 1130 | SEQ ID NO: 1131 |
| 53C1 | SEQ ID NO: 1132 | SEQ ID NO: 1133 |
| 35F6 | SEQ ID NO: 1134 | SEQ ID NO: 1135 |
| 36G2 | SEQ ID NO: 1136 | SEQ ID NO: 1137 |
| 39D5 | SEQ ID NO: 1138 | SEQ ID NO: 1139 |
| 42D12 | SEQ ID NO: 1140 | SEQ ID NO: 1141 |
| 35C1 | SEQ ID NO: 1142 | SEQ ID NO: 1143 |
| 41D12 | SEQ ID NO: 1144 | SEQ ID NO: 1145 |
| 41H8 | SEQ ID NO: 1146 | SEQ ID NO: 1147 |
| 35G2 | SEQ ID NO: 1148 | SEQ ID NO: 1149 |
| 40F1 | SEQ ID NO: 1150 | SEQ ID NO: 1151 |
| 53B1 | SEQ ID NO: 1152 | SEQ ID NO: 1153 |
| 39C3 | SEQ ID NO: 1154 | SEQ ID NO: 1155 |
| 53D1 | SEQ ID NO: 1156 | SEQ ID NO: 1157 |
| 53H1 | SEQ ID NO: 1158 | SEQ ID NO: 1159 |
| 53A2 | SEQ ID NO: 1160 | SEQ ID NO: 1161 |
| ARGX-110 | SEQ ID NO: 1162 | SEQ ID NO: 1163 |
| CTX-130 | SEQ ID NO: 1164 | SEQ ID NO: 1165 |
| CTX-130 | SEQ ID NO: 1166 | SEQ ID NO: 1167 |
| 4SCAR70 | SEQ ID NO: 1168 | SEQ ID NO: 1169 |

[0212] In some embodiments, the antigen recognition domain of a CAR described herein comprises an scFv comprising a VH and a VL, wherein the VH comprises a CDRH1, a CDRH2, and a CDRH3 each comprising the amino acid sequence of a CDRH1, a CDRH2, and a CDRH3 of an anti-CD70 antibody as provided in Table 2, and wherein and the VL comprises a CDRL1, a CDRL2, and a CDRL3 each comprising the amino acid sequence of a CDRL1, a CDRL2, and a CDRL3 of the same anti-CD70 antibody as provided in Table 3. Determination of CDR regions is well within the skill of the art. It is understood that in some embodiments, CDRs can be a combination of the Kabat and Chothia CDR (also termed “combined CRs” or “extended CDRs”). In some embodiments, the CDRs are the Kabat CDRs. In other embodiments, the CDRs are the Chothia CDRs. In other words, in embodiments with more than one CDR, the CDRs may be any of Kabat, Chothia, combination CDRs, or combinations thereof.

TABLE 2
Exemplary heavy chain complementarity determining
regions of anti-CD70 antibodies

| Antibody ID | | CDRH1 | CDRH2 | CDRH3 |
|---|---|---|---|---|
| 31H1 | Kabat | SEQ ID NO: 196 | SEQ ID NO: 197 | SEQ ID NO: 198 |
| | Chothia | SEQ ID NO: 199 | SEQ ID NO: 200 | |
| | Extended | SEQ ID NO: 201 | | |
| 63B2 | Kabat | SEQ ID NO: 202 | SEQ ID NO: 203 | SEQ ID NO: 204 |
| | Chothia | SEQ ID NO: 205 | SEQ ID NO: 206 | |
| | Extended | SEQ ID NO: 207 | | |
| 40E3 | Kabat | SEQ ID NO: 208 | SEQ ID NO: 209 | SEQ ID NO: 210 |
| | Chothia | SEQ ID NO: 211 | SEQ ID NO: 212 | |
| | Extended | SEQ ID NO: 213 | | |
| 42C3 | Kabat | SEQ ID NO: 214 | SEQ ID NO: 215 | SEQ ID NO: 216 |
| | Chothia | SEQ ID NO: 217 | SEQ ID NO: 218 | |
| | Extended | SEQ ID NO: 219 | | |
| 45F11 | Kabat | SEQ ID NO: 220 | SEQ ID NO: 221 | SEQ ID NO: 222 |
| | Chothia | SEQ ID NO: 223 | SEQ ID NO: 224 | |
| | Extended | SEQ ID NO: 225 | | |
| 64F9 | Kabat | SEQ ID NO: 226 | SEQ ID NO: 227 | SEQ ID NO: 228 |
| | Chothia | SEQ ID NO: 229 | SEQ ID NO: 230 | |
| | Extended | SEQ ID NO: 231 | | |
| 72C2 | Kabat | SEQ ID NO: 232 | SEQ ID NO: 233 | SEQ ID NO: 234 |
| | Chothia | SEQ ID NO: 235 | SEQ ID NO: 236 | |
| | Extended | SEQ ID NO: 237 | | |
| 2F10 | Kabat | SEQ ID NO: 238 | SEQ ID NO: 239 | SEQ ID NO: 240 |
| | Chothia | SEQ ID NO: 241 | SEQ ID NO: 242 | |
| | Extended | SEQ ID NO: 243 | | |
| 4F11 | Kabat | SEQ ID NO: 244 | SEQ ID NO: 245 | SEQ ID NO: 246 |
| | Chothia | SEQ ID NO: 247 | SEQ ID NO: 248 | |
| | Extended | SEQ ID NO: 249 | | |
| 10H10 | Kabat | SEQ ID NO: 250 | SEQ ID NO: 251 | SEQ ID NO: 252 |
| | Chothia | SEQ ID NO: 253 | SEQ ID NO: 254 | |
| | Extended | SEQ ID NO: 255 | | |
| 17G6 | Kabat | SEQ ID NO: 256 | SEQ ID NO: 257 | SEQ ID NO: 258 |
| | Chothia | SEQ ID NO: 259 | SEQ ID NO: 260 | |
| | Extended | SEQ ID NO: 261 | | |
| 65E11 | Kabat | SEQ ID NO: 262 | SEQ ID NO: 263 | SEQ ID NO: 264 |
| | Chothia | SEQ ID NO: 265 | SEQ ID NO: 266 | |
| | Extended | SEQ ID NO: 267 | | |
| P02B10 | Kabat | SEQ ID NO: 268 | SEQ ID NO: 269 | SEQ ID NO: 270 |
| | Chothia | SEQ ID NO: 271 | SEQ ID NO: 272 | |
| | Extended | SEQ ID NO: 273 | | |
| P07D03 | Kabat | SEQ ID NO: 274 | SEQ ID NO: 275 | SEQ ID NO: 276 |
| | Chothia | SEQ ID NO: 277 | SEQ ID NO: 278 | |
| | Extended | SEQ ID NO: 279 | | |
| P08A02 | Kabat | SEQ ID NO: 280 | SEQ ID NO: 281 | SEQ ID NO: 282 |
| | Chothia | SEQ ID NO: 283 | SEQ ID NO: 284 | |
| | Extended | SEQ ID NO: 285 | | |
| P08E02 | Kabat | SEQ ID NO: 286 | SEQ ID NO: 287 | SEQ ID NO: 288 |
| | Chothia | SEQ ID NO: 289 | SEQ ID NO: 290 | |
| | Extended | SEQ ID NO: 291 | | |
| P08F08 | Kabat | SEQ ID NO: 292 | SEQ ID NO: 293 | SEQ ID NO: 294 |
| | Chothia | SEQ ID NO: 295 | SEQ ID NO: 296 | |
| | Extended | SEQ ID NO: 297 | | |
| P08G02 | Kabat | SEQ ID NO: 298 | SEQ ID NO: 299 | SEQ ID NO: 300 |
| | Chothia | SEQ ID NO: 301 | SEQ ID NO: 302 | |
| | Extended | SEQ ID NO: 303 | | |
| P12B09 | Kabat | SEQ ID NO: 304 | SEQ ID NO: 305 | SEQ ID NO: 306 |
| | Chothia | SEQ ID NO: 307 | SEQ ID NO: 308 | |
| | Extended | SEQ ID NO: 309 | | |
| P12F02 | Kabat | SEQ ID NO: 310 | SEQ ID NO: 311 | SEQ ID NO: 312 |
| | Chothia | SEQ ID NO: 313 | SEQ ID NO: 314 | |
| | Extended | SEQ ID NO: 315 | | |
| P12G07 | Kabat | SEQ ID NO: 316 | SEQ ID NO: 317 | SEQ ID NO: 318 |
| | Chothia | SEQ ID NO: 319 | SEQ ID NO: 320 | |
| | Extended | SEQ ID NO: 321 | | |
| P13F04 | Kabat | SEQ ID NO: 322 | SEQ ID NO: 323 | SEQ ID NO: 324 |
| | Chothia | SEQ ID NO: 325 | SEQ ID NO: 326 | |
| | Extended | SEQ ID NO: 327 | | |
| P15D02 | Kabat | SEQ ID NO: 328 | SEQ ID NO: 329 | SEQ ID NO: 330 |
| | Chothia | SEQ ID NO: 331 | SEQ ID NO: 332 | |
| | Extended | SEQ ID NO: 333 | | |
| P16C05 | Kabat | SEQ ID NO: 334 | SEQ ID NO: 335 | SEQ ID NO: 336 |
| | Chothia | SEQ ID NO: 337 | SEQ ID NO: 338 | |
| | Extended | SEQ ID NO: 339 | | |
| 10A1 | Kabat | SEQ ID NO: 340 | SEQ ID NO: 341 | SEQ ID NO: 342 |
| | Chothia | SEQ ID NO: 343 | SEQ ID NO: 344 | |
| | Extended | SEQ ID NO: 345 | | |
| 10E2 | Kabat | SEQ ID NO: 346 | SEQ ID NO: 347 | SEQ ID NO: 348 |
| | Chothia | SEQ ID NO: 349 | SEQ ID NO: 350 | |
| | Extended | SEQ ID NO: 351 | | |
| 11A1 | Kabat | SEQ ID NO: 352 | SEQ ID NO: 353 | SEQ ID NO: 354 |
| | Chothia | SEQ ID NO: 355 | SEQ ID NO: 356 | |
| | Extended | SEQ ID NO: 357 | | |
| 11C1 | Kabat | SEQ ID NO: 358 | SEQ ID NO: 359 | SEQ ID NO: 360 |
| | Chothia | SEQ ID NO: 361 | SEQ ID NO: 362 | |
| | Extended | SEQ ID NO: 363 | | |
| 11D1 | Kabat | SEQ ID NO: 364 | SEQ ID NO: 365 | SEQ ID NO: 366 |
| | Chothia | SEQ ID NO: 367 | SEQ ID NO: 368 | |
| | Extended | SEQ ID NO: 369 | | |
| 11E1 | Kabat | SEQ ID NO: 370 | SEQ ID NO: 371 | SEQ ID NO: 372 |
| | Chothia | SEQ ID NO: 373 | SEQ ID NO: 374 | |
| | Extended | SEQ ID NO: 375 | | |
| 12A2 | Kabat | SEQ ID NO: 376 | SEQ ID NO: 377 | SEQ ID NO: 378 |
| | Chothia | SEQ ID NO: 379 | SEQ ID NO: 380 | |
| | Extended | SEQ ID NO: 381 | | |
| 12C4 | Kabat | SEQ ID NO: 382 | SEQ ID NO: 383 | SEQ ID NO: 384 |
| | Chothia | SEQ ID NO: 385 | SEQ ID NO: 386 | |
| | Extended | SEQ ID NO: 387 | | |
| 12C5 | Kabat | SEQ ID NO: 388 | SEQ ID NO: 389 | SEQ ID NO: 390 |
| | Chothia | SEQ ID NO: 391 | SEQ ID NO: 392 | |
| | Extended | SEQ ID NO: 393 | | |
| 12D3 | Kabat | SEQ ID NO: 394 | SEQ ID NO: 395 | SEQ ID NO: 396 |
| | Chothia | SEQ ID NO: 397 | SEQ ID NO: 398 | |
| | Extended | SEQ ID NO: 399 | | |
| 12D6 | Kabat | SEQ ID NO: 400 | SEQ ID NO: 401 | SEQ ID NO: 402 |
| | Chothia | SEQ ID NO: 403 | SEQ ID NO: 404 | |
| | Extended | SEQ ID NO: 405 | | |
| 12D7 | Kabat | SEQ ID NO: 406 | SEQ ID NO: 407 | SEQ ID NO: 408 |
| | Chothia | SEQ ID NO: 409 | SEQ ID NO: 410 | |
| | Extended | SEQ ID NO: 411 | | |
| 12F5 | Kabat | SEQ ID NO: 412 | SEQ ID NO: 413 | SEQ ID NO: 414 |
| | Chothia | SEQ ID NO: 415 | SEQ ID NO: 416 | |
| | Extended | SEQ ID NO: 417 | | |
| 12H4 | Kabat | SEQ ID NO: 418 | SEQ ID NO: 419 | SEQ ID NO: 420 |
| | Chothia | SEQ ID NO: 421 | SEQ ID NO: 422 | |
| | Extended | SEQ ID NO: 423 | | |
| 8C8 | Kabat | SEQ ID NO: 424 | SEQ ID NO: 425 | SEQ ID NO: 426 |
| | Chothia | SEQ ID NO: 427 | SEQ ID NO: 428 | |
| | Extended | SEQ ID NO: 429 | | |
| 8F7 | Kabat | SEQ ID NO: 430 | SEQ ID NO: 431 | SEQ ID NO: 432 |
| | Chothia | SEQ ID NO: 433 | SEQ ID NO: 434 | |
| | Extended | SEQ ID NO: 435 | | |
| 8F8 | Kabat | SEQ ID NO: 436 | SEQ ID NO: 437 | SEQ ID NO: 438 |
| | Chothia | SEQ ID NO: 439 | SEQ ID NO: 440 | |
| | Extended | SEQ ID NO: 441 | | |
| 9D8 | Kabat | SEQ ID NO: 442 | SEQ ID NO: 443 | SEQ ID NO: 444 |
| | Chothia | SEQ ID NO: 445 | SEQ ID NO: 446 | |
| | Extended | SEQ ID NO: 447 | | |
| 9E10 | Kabat | SEQ ID NO: 448 | SEQ ID NO: 449 | SEQ ID NO: 450 |
| | Chothia | SEQ ID NO: 451 | SEQ ID NO: 452 | |
| | Extended | SEQ ID NO: 453 | | |
| 9E5 | Kabat | SEQ ID NO: 454 | SEQ ID NO: 455 | SEQ ID NO: 456 |
| | Chothia | SEQ ID NO: 457 | SEQ ID NO: 458 | |
| | Extended | SEQ ID NO: 459 | | |
| 9F4 | Kabat | SEQ ID NO: 460 | SEQ ID NO: 461 | SEQ ID NO: 462 |
| | Chothia | SEQ ID NO: 463 | SEQ ID NO: 464 | |
| | Extended | SEQ ID NO: 465 | | |
| 9F8 | Kabat | SEQ ID NO: 466 | SEQ ID NO: 467 | SEQ ID NO: 468 |
| | Chothia | SEQ ID NO: 469 | SEQ ID NO: 470 | |
| | Extended | SEQ ID NO: 471 | | |
| 12C6 | Kabat | SEQ ID NO: 472 | SEQ ID NO: 473 | SEQ ID NO: 474 |
| | Chothia | SEQ ID NO: 475 | SEQ ID NO: 476 | |
| | Extended | SEQ ID NO: 477 | | |
| CD70-1 | Kabat | SEQ ID NO: 1170 | SEQ ID NO: 1171 | SEQ ID NO: 1172 |
| CD70-2 | Kabat | SEQ ID NO: 1173 | SEQ ID NO: 1174 | SEQ ID NO: 1175 |
| CD70-3 | Kabat | SEQ ID NO: 1176 | SEQ ID NO: 1177 | SEQ ID NO: 1178 |
| CD70-4 | Kabat | SEQ ID NO: 1179 | SEQ ID NO: 1180 | SEQ ID NO: 1181 |
| CD70-5 | Kabat | SEQ ID NO: 1182 | SEQ ID NO: 1183 | SEQ ID NO: 1184 |
| CD70-6 | Kabat | SEQ ID NO: 1185 | SEQ ID NO: 1186 | SEQ ID NO: 1187 |
| CD70-7 | Kabat | SEQ ID NO: 1188 | SEQ ID NO: 1189 | SEQ ID NO: 1190 |
| CD70-8 | Kabat | SEQ ID NO: 1191 | SEQ ID NO: 1192 | SEQ ID NO: 1193 |
| CD70-9 | Kabat | SEQ ID NO: 1194 | SEQ ID NO: 1195 | SEQ ID NO: 1196 |
| CD70-10 | Kabat | SEQ ID NO: 1197 | SEQ ID NO: 1198 | SEQ ID NO: 1199 |
| CD70-11 | Kabat | SEQ ID NO: 1200 | SEQ ID NO: 1201 | SEQ ID NO: 1202 |
| CD70-12 | Kabat | SEQ ID NO: 1203 | SEQ ID NO: 1204 | SEQ ID NO: 1205 |
| CD70-13 | Kabat | SEQ ID NO: 1206 | SEQ ID NO: 1207 | SEQ ID NO: 1208 |
| CD70-14 | Kabat | SEQ ID NO: 1209 | SEQ ID NO: 1210 | SEQ ID NO: 1211 |
| CD70-15 | Kabat | SEQ ID NO: 1212 | SEQ ID NO: 1213 | SEQ ID NO: 1214 |
| CD70-16 | Kabat | SEQ ID NO: 1215 | SEQ ID NO: 1216 | SEQ ID NO: 1217 |
| CD70-17 | Kabat | SEQ ID NO: 1218 | SEQ ID NO: 1219 | SEQ ID NO: 1220 |
| CD70-18 | Kabat | SEQ ID NO: 1221 | SEQ ID NO: 1222 | SEQ ID NO: 1223 |
| CD70-19 | Kabat | SEQ ID NO: 1224 | SEQ ID NO: 1225 | SEQ ID NO: 1226 |
| CD70-20 | Kabat | SEQ ID NO: 1227 | SEQ ID NO: 1228 | SEQ ID NO: 1229 |
| CD70-21 | Kabat | SEQ ID NO: 1230 | SEQ ID NO: 1231 | SEQ ID NO: 1232 |
| CD70-22 | Kabat | SEQ ID NO: 1233 | SEQ ID NO: 1234 | SEQ ID NO: 1235 |
| CD70-23 | Kabat | SEQ ID NO: 1236 | SEQ ID NO: 1237 | SEQ ID NO: 1238 |
| CD70-24 | Kabat | SEQ ID NO: 1239 | SEQ ID NO: 1240 | SEQ ID NO: 1241 |
| CD70-25 | Kabat | SEQ ID NO: 1242 | SEQ ID NO: 1243 | SEQ ID NO: 1244 |
| CD70-26 | Kabat | SEQ ID NO: 1245 | SEQ ID NO: 1246 | SEQ ID NO: 1247 |
| CD70-27 | Kabat | SEQ ID NO: 1248 | SEQ ID NO: 1249 | SEQ ID NO: 1250 |
| CD70-28 | Kabat | SEQ ID NO: 1251 | SEQ ID NO: 1252 | SEQ ID NO: 1253 |
| CD70-29 | Kabat | SEQ ID NO: 1254 | SEQ ID NO: 1255 | SEQ ID NO: 1256 |
| CD70-30 | Kabat | SEQ ID NO: 1257 | SEQ ID NO: 1258 | SEQ ID NO: 1259 |
| CD70-31 | Kabat | SEQ ID NO: 1260 | SEQ ID NO: 1261 | SEQ ID NO: 1262 |
| CD70-32 | Kabat | SEQ ID NO: 1263 | SEQ ID NO: 1264 | SEQ ID NO: 1265 |
| CD70-33 | Kabat | SEQ ID NO: 1266 | SEQ ID NO: 1267 | SEQ ID NO: 1268 |
| CD70-34 | Kabat | SEQ ID NO: 1269 | SEQ ID NO: 1270 | SEQ ID NO: 1271 |
| CD70-35 | Kabat | SEQ ID NO: 1272 | SEQ ID NO: 1273 | SEQ ID NO: 1274 |
| CD70-36 | Kabat | SEQ ID NO: 1275 | SEQ ID NO: 1276 | SEQ ID NO: 1277 |
| CD70-37 | Kabat | SEQ ID NO: 1278 | SEQ ID NO: 1279 | SEQ ID NO: 1280 |
| CD70-38 | Kabat | SEQ ID NO: 1281 | SEQ ID NO: 1282 | SEQ ID NO: 1283 |
| CD70-39 | Kabat | SEQ ID NO: 1284 | SEQ ID NO: 1285 | SEQ ID NO: 1286 |
| CD70-40 | Kabat | SEQ ID NO: 1287 | SEQ ID NO: 1288 | SEQ ID NO: 1289 |
| CD70-41 | Kabat | SEQ ID NO: 1290 | SEQ ID NO: 1291 | SEQ ID NO: 1292 |
| CD70-42 | Kabat | SEQ ID NO: 1293 | SEQ ID NO: 1294 | SEQ ID NO: 1295 |
| CD70-43 | Kabat | SEQ ID NO: 1296 | SEQ ID NO: 1297 | SEQ ID NO: 1298 |
| CD70-44 | Kabat | SEQ ID NO: 1299 | SEQ ID NO: 1300 | SEQ ID NO: 1301 |
| CD70-45 | Kabat | SEQ ID NO: 1302 | SEQ ID NO: 1303 | SEQ ID NO: 1304 |
| CD70-46 | Kabat | SEQ ID NO: 1305 | SEQ ID NO: 1306 | SEQ ID NO: 1307 |
| CD70-47 | Kabat | SEQ ID NO: 1308 | SEQ ID NO: 1309 | SEQ ID NO: 1310 |
| CD70-48 | Kabat | SEQ ID NO: 1311 | SEQ ID NO: 1312 | SEQ ID NO: 1313 |
| CD70-49 | Kabat | SEQ ID NO: 1314 | SEQ ID NO: 1315 | SEQ ID NO: 1316 |
| CD70-50 | Kabat | SEQ ID NO: 1317 | SEQ ID NO: 1318 | SEQ ID NO: 1319 |
| CD70-51 | Kabat | SEQ ID NO: 1320 | SEQ ID NO: 1321 | SEQ ID NO: 1322 |
| CD70-52 | Kabat | SEQ ID NO: 1323 | SEQ ID NO: 1324 | SEQ ID NO: 1325 |
| CD70-53 | Kabat | SEQ ID NO: 1326 | SEQ ID NO: 1327 | SEQ ID NO: 1328 |
| CD70-54 | Kabat | SEQ ID NO: 1329 | SEQ ID NO: 1330 | SEQ ID NO: 1331 |
| CD70-55 | Kabat | SEQ ID NO: 1332 | SEQ ID NO: 1333 | SEQ ID NO: 1334 |
| CD70-56 | Kabat | SEQ ID NO: 1335 | SEQ ID NO: 1336 | SEQ ID NO: 1337 |
| CD70-57 | Kabat | SEQ ID NO: 1338 | SEQ ID NO: 1339 | SEQ ID NO: 1340 |
| CD70-58 | Kabat | SEQ ID NO: 1341 | SEQ ID NO: 1342 | SEQ ID NO: 1343 |
| CD70-59 | Kabat | SEQ ID NO: 1344 | SEQ ID NO: 1345 | SEQ ID NO: 1346 |
| CD70-60 | Kabat | SEQ ID NO: 1347 | SEQ ID NO: 1348 | SEQ ID NO: 1349 |
| CD70-61 | Kabat | SEQ ID NO: 1350 | SEQ ID NO: 1351 | SEQ ID NO: 1352 |
| CD70-62 | Kabat | SEQ ID NO: 1353 | SEQ ID NO: 1354 | SEQ ID NO: 1355 |
| CD70-63 | Kabat | SEQ ID NO: 1356 | SEQ ID NO: 1357 | SEQ ID NO: 1358 |
| CD70-64 | Kabat | SEQ ID NO: 1359 | SEQ ID NO: 1360 | SEQ ID NO: 1361 |
| CD70-65 | Kabat | SEQ ID NO: 1362 | SEQ ID NO: 1363 | SEQ ID NO: 1364 |
| CD70-66 | Kabat | SEQ ID NO: 1365 | SEQ ID NO: 1366 | SEQ ID NO: 1367 |
| CD70-67 | Kabat | SEQ ID NO: 1368 | SEQ ID NO: 1369 | SEQ ID NO: 1370 |
| CD70-68 | Kabat | SEQ ID NO: 1371 | SEQ ID NO: 1372 | SEQ ID NO: 1373 |
| CD70-69 | Kabat | SEQ ID NO: 1374 | SEQ ID NO: 1375 | SEQ ID NO: 1376 |
| CD70-70 | Kabat | SEQ ID NO: 1377 | SEQ ID NO: 1378 | SEQ ID NO: 1379 |
| CD70-71 | Kabat | SEQ ID NO: 1380 | SEQ ID NO: 1381 | SEQ ID NO: 1382 |
| CD70-72 | Kabat | SEQ ID NO: 1383 | SEQ ID NO: 1384 | SEQ ID NO: 1385 |
| CD70-73 | Kabat | SEQ ID NO: 1386 | SEQ ID NO: 1387 | SEQ ID NO: 1388 |
| CD70-74 | Kabat | SEQ ID NO: 1389 | SEQ ID NO: 1390 | SEQ ID NO: 1391 |
| CD70-75 | Kabat | SEQ ID NO: 1392 | SEQ ID NO: 1393 | SEQ ID NO: 1394 |
| CD70-76 | Kabat | SEQ ID NO: 1395 | SEQ ID NO: 1396 | SEQ ID NO: 1397 |
| CD70-77 | Kabat | SEQ ID NO: 1398 | SEQ ID NO: 1399 | SEQ ID NO: 1400 |
| CD70-78 | Kabat | SEQ ID NO: 1401 | SEQ ID NO: 1402 | SEQ ID NO: 1403 |
| CD70-79 | Kabat | SEQ ID NO: 1404 | SEQ ID NO: 1405 | SEQ ID NO: 1406 |
| CD70-80 | Kabat | SEQ ID NO: 1407 | SEQ ID NO: 1408 | SEQ ID NO: 1409 |
| CD70-81 | Kabat | SEQ ID NO: 1410 | SEQ ID NO: 1411 | SEQ ID NO: 1412 |
| CD70-82 | Kabat | SEQ ID NO: 1413 | SEQ ID NO: 1414 | SEQ ID NO: 1415 |
| CD70-83 | Kabat | SEQ ID NO: 1416 | SEQ ID NO: 1417 | SEQ ID NO: 1418 |
| CD70-84 | Kabat | SEQ ID NO: 1419 | SEQ ID NO: 1420 | SEQ ID NO: 1421 |
| CD70-85 | Kabat | SEQ ID NO: 1422 | SEQ ID NO: 1423 | SEQ ID NO: 1424 |
| CD70-86 | Kabat | SEQ ID NO: 1425 | SEQ ID NO: 1426 | SEQ ID NO: 1427 |
| CD70-87 | Kabat | SEQ ID NO: 1428 | SEQ ID NO: 1429 | SEQ ID NO: 1430 |
| CD70-88 | Kabat | SEQ ID NO: 1431 | SEQ ID NO: 1432 | SEQ ID NO: 1433 |
| CD70-89 | Kabat | SEQ ID NO: 1434 | SEQ ID NO: 1435 | SEQ ID NO: 1436 |
| CD70-90 | Kabat | SEQ ID NO: 1437 | SEQ ID NO: 1438 | SEQ ID NO: 1439 |
| CD70-91 | Kabat | SEQ ID NO: 1440 | SEQ ID NO: 1441 | SEQ ID NO: 1442 |
| CD70-92 | Kabat | SEQ ID NO: 1443 | SEQ ID NO: 1444 | SEQ ID NO: 1445 |
| CD70-93 | Kabat | SEQ ID NO: 1446 | SEQ ID NO: 1447 | SEQ ID NO: 1448 |
| CD70-94 | Kabat | SEQ ID NO: 1449 | SEQ ID NO: 1450 | SEQ ID NO: 1451 |
| CD70-95 | Kabat | SEQ ID NO: 1452 | SEQ ID NO: 1453 | SEQ ID NO: 1454 |
| CD70-96 | Kabat | SEQ ID NO: 1455 | SEQ ID NO: 1456 | SEQ ID NO: 1457 |
| CD70-97 | Kabat | SEQ ID NO: 1458 | SEQ ID NO: 1459 | SEQ ID NO: 1460 |
| CD70-98 | Kabat | SEQ ID NO: 1461 | SEQ ID NO: 1462 | SEQ ID NO: 1463 |
| CD70-99 | Kabat | SEQ ID NO: 1464 | SEQ ID NO: 1465 | SEQ ID NO: 1466 |
| CD70-100 | Kabat | SEQ ID NO: 1467 | SEQ ID NO: 1468 | SEQ ID NO: 1469 |
| CD70-101 | Kabat | SEQ ID NO: 1470 | SEQ ID NO: 1471 | SEQ ID NO: 1472 |
| CD70-102 | Kabat | SEQ ID NO: 1473 | SEQ ID NO: 1474 | SEQ ID NO: 1475 |
| CD70-103 | Kabat | SEQ ID NO: 1476 | SEQ ID NO: 1477 | SEQ ID NO: 1478 |
| CD70-104 | Kabat | SEQ ID NO: 1479 | SEQ ID NO: 1480 | SEQ ID NO: 1481 |
| CD70-105 | Kabat | SEQ ID NO: 1482 | SEQ ID NO: 1483 | SEQ ID NO: 1484 |
| CD70-106 | Kabat | SEQ ID NO: 1485 | SEQ ID NO: 1486 | SEQ ID NO: 1487 |
| CD70-107 | Kabat | SEQ ID NO: 1488 | SEQ ID NO: 1489 | SEQ ID NO: 1490 |
| CD70-108 | Kabat | SEQ ID NO: 1491 | SEQ ID NO: 1492 | SEQ ID NO: 1493 |
| CD70-109 | Kabat | SEQ ID NO: 1494 | SEQ ID NO: 1495 | SEQ ID NO: 1496 |
| CD70-110 | Kabat | SEQ ID NO: 1497 | SEQ ID NO: 1498 | SEQ ID NO: 1499 |
| CD70-111 | Kabat | SEQ ID NO: 1500 | SEQ ID NO: 1501 | SEQ ID NO: 1502 |
| CD70-112 | Kabat | SEQ ID NO: 1503 | SEQ ID NO: 1504 | SEQ ID NO: 1505 |
| CD70-113 | Kabat | SEQ ID NO: 1506 | SEQ ID NO: 1507 | SEQ ID NO: 1508 |
| CD70-114 | Kabat | SEQ ID NO: 1509 | SEQ ID NO: 1510 | SEQ ID NO: 1511 |
| CD70-115 | Kabat | SEQ ID NO: 1512 | SEQ ID NO: 1513 | SEQ ID NO: 1514 |
| CD70-116 | Kabat | SEQ ID NO: 1515 | SEQ ID NO: 1516 | SEQ ID NO: 1517 |
| CD70-117 | Kabat | SEQ ID NO: 1518 | SEQ ID NO: 1519 | SEQ ID NO: 1520 |
| CD70-118 | Kabat | SEQ ID NO: 1521 | SEQ ID NO: 1522 | SEQ ID NO: 1523 |
| CD70-119 | Kabat | SEQ ID NO: 1524 | SEQ ID NO: 1525 | SEQ ID NO: 1526 |
| CD70-120 | Kabat | SEQ ID NO: 1527 | SEQ ID NO: 1528 | SEQ ID NO: 1529 |
| CD70-121 | Kabat | SEQ ID NO: 1530 | SEQ ID NO: 1531 | SEQ ID NO: 1532 |
| CD70-122 | Kabat | SEQ ID NO: 1533 | SEQ ID NO: 1534 | SEQ ID NO: 1535 |
| CD70-123 | Kabat | SEQ ID NO: 1536 | SEQ ID NO: 1537 | SEQ ID NO: 1538 |
| CD70-124 | Kabat | SEQ ID NO: 1539 | SEQ ID NO: 1540 | SEQ ID NO: 1541 |
| CD70-125 | Kabat | SEQ ID NO: 1542 | SEQ ID NO: 1543 | SEQ ID NO: 1544 |
| CD70-126 | Kabat | SEQ ID NO: 1545 | SEQ ID NO: 1546 | SEQ ID NO: 1547 |
| CD70-127 | Kabat | SEQ ID NO: 1548 | SEQ ID NO: 1549 | SEQ ID NO: 1550 |
| CD70-128 | Kabat | SEQ ID NO: 1551 | SEQ ID NO: 1552 | SEQ ID NO: 1553 |
| CD70-129 | Kabat | SEQ ID NO: 1554 | SEQ ID NO: 1555 | SEQ ID NO: 1556 |
| CD70-130 | Kabat | SEQ ID NO: 1557 | SEQ ID NO: 1558 | SEQ ID NO: 1559 |
| CD70-131 | Kabat | SEQ ID NO: 1560 | SEQ ID NO: 1561 | SEQ ID NO: 1562 |
| CD70-132 | Kabat | SEQ ID NO: 1563 | SEQ ID NO: 1564 | SEQ ID NO: 1565 |
| CD70-133 | Kabat | SEQ ID NO: 1566 | SEQ ID NO: 1567 | SEQ ID NO: 1568 |
| CD70-134 | Kabat | SEQ ID NO: 1569 | SEQ ID NO: 1570 | SEQ ID NO: 1571 |
| CD70-135 | Kabat | SEQ ID NO: 1572 | SEQ ID NO: 1573 | SEQ ID NO: 1574 |
| CD70-136 | Kabat | SEQ ID NO: 1575 | SEQ ID NO: 1576 | SEQ ID NO: 1577 |
| CD70-137 | Kabat | SEQ ID NO: 1578 | SEQ ID NO: 1579 | SEQ ID NO: 1580 |
| CD70-138 | Kabat | SEQ ID NO: 1581 | SEQ ID NO: 1582 | SEQ ID NO: 1583 |
| CD70-139 | Kabat | SEQ ID NO: 1584 | SEQ ID NO: 1585 | SEQ ID NO: 1586 |
| CD70-140 | Kabat | SEQ ID NO: 1587 | SEQ ID NO: 1588 | SEQ ID NO: 1589 |
| CD70-141 | Kabat | SEQ ID NO: 1590 | SEQ ID NO: 1591 | SEQ ID NO: 1592 |
| CD70-142 | Kabat | SEQ ID NO: 1593 | SEQ ID NO: 1594 | SEQ ID NO: 1595 |
| CD70-143 | Kabat | SEQ ID NO: 1596 | SEQ ID NO: 1597 | SEQ ID NO: 1598 |
| CD70-144 | Kabat | SEQ ID NO: 1599 | SEQ ID NO: 1600 | SEQ ID NO: 1601 |
| CD70-145 | Kabat | SEQ ID NO: 1602 | SEQ ID NO: 1603 | SEQ ID NO: 1604 |
| CD70-146 | Kabat | SEQ ID NO: 1605 | SEQ ID NO: 1606 | SEQ ID NO: 1607 |
| CD70-147 | Kabat | SEQ ID NO: 1608 | SEQ ID NO: 1609 | SEQ ID NO: 1610 |
| CD70-148 | Kabat | SEQ ID NO: 1611 | SEQ ID NO: 1612 | SEQ ID NO: 1613 |
| CD70-149 | Kabat | SEQ ID NO: 1614 | SEQ ID NO: 1615 | SEQ ID NO: 1616 |
| CD70-150 | Kabat | SEQ ID NO: 1617 | SEQ ID NO: 1618 | SEQ ID NO: 1619 |
| CD70-151 | Kabat | SEQ ID NO: 1620 | SEQ ID NO: 1621 | SEQ ID NO: 1622 |
| CD70-152 | Kabat | SEQ ID NO: 1623 | SEQ ID NO: 1624 | SEQ ID NO: 1625 |
| CD70-153 | Kabat | SEQ ID NO: 1626 | SEQ ID NO: 1627 | SEQ ID NO: 1628 |
| CD70-154 | Kabat | SEQ ID NO: 1629 | SEQ ID NO: 1630 | SEQ ID NO: 1631 |
| CD70-155 | Kabat | SEQ ID NO: 1632 | SEQ ID NO: 1633 | SEQ ID NO: 1634 |
| CD70-156 | Kabat | SEQ ID NO: 1635 | SEQ ID NO: 1636 | SEQ ID NO: 1637 |
| CD70-157 | Kabat | SEQ ID NO: 1638 | SEQ ID NO: 1639 | SEQ ID NO: 1640 |
| CD70-158 | Kabat | SEQ ID NO: 1641 | SEQ ID NO: 1642 | SEQ ID NO: 1643 |
| CD70-159 | Kabat | SEQ ID NO: 1644 | SEQ ID NO: 1645 | SEQ ID NO: 1646 |
| CD70-160 | Kabat | SEQ ID NO: 1647 | SEQ ID NO: 1648 | SEQ ID NO: 1649 |
| CD70-161 | Kabat | SEQ ID NO: 1650 | SEQ ID NO: 1651 | SEQ ID NO: 1652 |
| CD70-162 | Kabat | SEQ ID NO: 1653 | SEQ ID NO: 1654 | SEQ ID NO: 1655 |
| CD70-163 | Kabat | SEQ ID NO: 1656 | SEQ ID NO: 1657 | SEQ ID NO: 1658 |
| CD70-164 | Kabat | SEQ ID NO: 1659 | SEQ ID NO: 1660 | SEQ ID NO: 1661 |
| CD70-165 | Kabat | SEQ ID NO: 1662 | SEQ ID NO: 1663 | SEQ ID NO: 1664 |
| CD70-166 | Kabat | SEQ ID NO: 1665 | SEQ ID NO: 1666 | SEQ ID NO: 1667 |
| CD70-167 | Kabat | SEQ ID NO: 1668 | SEQ ID NO: 1669 | SEQ ID NO: 1670 |
| CD70-168 | Kabat | SEQ ID NO: 1671 | SEQ ID NO: 1672 | SEQ ID NO: 1673 |
| CD70-169 | Kabat | SEQ ID NO: 1674 | SEQ ID NO: 1675 | SEQ ID NO: 1676 |
| CD70-170 | Kabat | SEQ ID NO: 1677 | SEQ ID NO: 1678 | SEQ ID NO: 1679 |
| CD70-171 | Kabat | SEQ ID NO: 1680 | SEQ ID NO: 1681 | SEQ ID NO: 1682 |
| CD70-172 | Kabat | SEQ ID NO: 1683 | SEQ ID NO: 1684 | SEQ ID NO: 1685 |
| CD70-173 | Kabat | SEQ ID NO: 1686 | SEQ ID NO: 1687 | SEQ ID NO: 1688 |
| CD70-174 | Kabat | SEQ ID NO: 1689 | SEQ ID NO: 1690 | SEQ ID NO: 1691 |
| CD70-175 | Kabat | SEQ ID NO: 1692 | SEQ ID NO: 1693 | SEQ ID NO: 1694 |
| CD70-176 | Kabat | SEQ ID NO: 1695 | SEQ ID NO: 1696 | SEQ ID NO: 1697 |
| CD70-177 | Kabat | SEQ ID NO: 1698 | SEQ ID NO: 1699 | SEQ ID NO: 1700 |
| CD70-178 | Kabat | SEQ ID NO: 1701 | SEQ ID NO: 1702 | SEQ ID NO: 1703 |
| CD70-179 | Kabat | SEQ ID NO: 1704 | SEQ ID NO: 1705 | SEQ ID NO: 1706 |
| CD70-180 | Kabat | SEQ ID NO: 1707 | SEQ ID NO: 1708 | SEQ ID NO: 1709 |
| 1C2 | Kabat | SEQ ID NO: 1710 | SEQ ID NO: 1711 | SEQ ID NO: 1712 |
| 9D1 | Kabat | SEQ ID NO: 1713 | SEQ ID NO: 1714 | SEQ ID NO: 1715 |
| 8B12 | Kabat | SEQ ID NO: 1716 | SEQ ID NO: 1717 | SEQ ID NO: 1718 |
| 8C12 | Kabat | SEQ ID NO: 1719 | SEQ ID NO: 1720 | SEQ ID NO: 1721 |
| 9E1 | Kabat | SEQ ID NO: 1722 | SEQ ID NO: 1723 | SEQ ID NO: 1724 |
| 5F4 | Kabat | SEQ ID NO: 1725 | SEQ ID NO: 1726 | SEQ ID NO: 1727 |
| 5B2 | Kabat | SEQ ID NO: 1728 | SEQ ID NO: 1729 | SEQ ID NO: 1730 |
| 6D5 | Kabat | SEQ ID NO: 1731 | SEQ ID NO: 1732 | SEQ ID NO: 1733 |
| 4D2 | Kabat | SEQ ID NO: 1734 | SEQ ID NO: 1735 | SEQ ID NO: 1736 |
| 9A1 | Kabat | SEQ ID NO: 1737 | SEQ ID NO: 1738 | SEQ ID NO: 1739 |
| 9G2 | Kabat | SEQ ID NO: 1740 | SEQ ID NO: 1741 | SEQ ID NO: 1742 |
| 9B2 | Kabat | SEQ ID NO: 1743 | SEQ ID NO: 1744 | SEQ ID NO: 1745 |
| 24E3 | Kabat | SEQ ID NO: 1746 | SEQ ID NO: 1747 | SEQ ID NO: 1748 |
| 33D8 | Kabat | SEQ ID NO: 1749 | SEQ ID NO: 1750 | SEQ ID NO: 1751 |
| 24F2 | Kabat | SEQ ID NO: 1752 | SEQ ID NO: 1753 | SEQ ID NO: 1754 |
| 24B6 | Kabat | SEQ ID NO: 1755 | SEQ ID NO: 1756 | SEQ ID NO: 1757 |
| 19G10 | Kabat | SEQ ID NO: 1758 | SEQ ID NO: 1759 | SEQ ID NO: 1760 |
| 45B12 | Kabat | SEQ ID NO: 1761 | SEQ ID NO: 1762 | SEQ ID NO: 1763 |
| 45D9 | Kabat | SEQ ID NO: 1764 | SEQ ID NO: 1765 | SEQ ID NO: 1766 |
| 45F8 | Kabat | SEQ ID NO: 1767 | SEQ ID NO: 1768 | SEQ ID NO: 1769 |
| 45A12 | Kabat | SEQ ID NO: 1770 | SEQ ID NO: 1771 | SEQ ID NO: 1772 |
| 45B6 | Kabat | SEQ ID NO: 1773 | SEQ ID NO: 1774 | SEQ ID NO: 1775 |
| 57B6 | Kabat | SEQ ID NO: 1776 | SEQ ID NO: 1777 | SEQ ID NO: 1778 |
| 59D10 | Kabat | SEQ ID NO: 1779 | SEQ ID NO: 1780 | SEQ ID NO: 1781 |
| 27B3 | Kabat | SEQ ID NO: 1782 | SEQ ID NO: 1783 | SEQ ID NO: 1784 |
| 36A9 | Kabat | SEQ ID NO: 1785 | SEQ ID NO: 1786 | SEQ ID NO: 1787 |
| 53F1 | Kabat | SEQ ID NO: 1788 | SEQ ID NO: 1789 | SEQ ID NO: 1790 |
| 36D6 | Kabat | SEQ ID NO: 1791 | SEQ ID NO: 1792 | SEQ ID NO: 1793 |
| 53G1 | Kabat | SEQ ID NO: 1794 | SEQ ID NO: 1795 | SEQ ID NO: 1796 |
| 35G3 | Kabat | SEQ ID NO: 1797 | SEQ ID NO: 1798 | SEQ ID NO: 1799 |
| 53C1 | Kabat | SEQ ID NO: 1800 | SEQ ID NO: 1801 | SEQ ID NO: 1802 |
| 35F6 | Kabat | SEQ ID NO: 1803 | SEQ ID NO: 1804 | SEQ ID NO: 1805 |
| 36G2 | Kabat | SEQ ID NO: 1806 | SEQ ID NO: 1807 | SEQ ID NO: 1808 |
| 39D5 | Kabat | SEQ ID NO: 1809 | SEQ ID NO: 1810 | SEQ ID NO: 1811 |
| 42D12 | Kabat | SEQ ID NO: 1812 | SEQ ID NO: 1813 | SEQ ID NO: 1814 |
| 35C1 | Kabat | SEQ ID NO: 1815 | SEQ ID NO: 1816 | SEQ ID NO: 1817 |
| 41D12 | Kabat | SEQ ID NO: 1818 | SEQ ID NO: 1819 | SEQ ID NO: 1820 |
| 41H8 | Kabat | SEQ ID NO: 1821 | SEQ ID NO: 1822 | SEQ ID NO: 1823 |
| 35G2 | Kabat | SEQ ID NO: 1824 | SEQ ID NO: 1825 | SEQ ID NO: 1826 |
| 40F1 | Kabat | SEQ ID NO: 1827 | SEQ ID NO: 1828 | SEQ ID NO: 1829 |
| 53B1 | Kabat | SEQ ID NO: 1830 | SEQ ID NO: 1831 | SEQ ID NO: 1832 |
| 39C3 | Kabat | SEQ ID NO: 1833 | SEQ ID NO: 1834 | SEQ ID NO: 1835 |
| 53D1 | Kabat | SEQ ID NO: 1836 | SEQ ID NO: 1837 | SEQ ID NO: 1838 |
| 53H1 | Kabat | SEQ ID NO: 1839 | SEQ ID NO: 1840 | SEQ ID NO: 1841 |
| 53A2 | Kabat | SEQ ID NO: 1842 | SEQ ID NO: 1843 | SEQ ID NO: 1844 |
| ARGX-110 | Kabat | SEQ ID NO: 1845 | SEQ ID NO: 1846 | SEQ ID NO: 1847 |
| CTX-130 | Kabat | SEQ ID NO: 1848 | SEQ ID NO: 1849 | SEQ ID NO: 1850 |
| CTX-130 | Kabat | SEQ ID NO: 1851 | SEQ ID NO: 1852 | SEQ ID NO: 1853 |
| 4SCAR70 | Kabat | SEQ ID NO: 1854 | SEQ ID NO: 1855 | SEQ ID NO: 1856 |

TABLE 3
Exemplary light chain complementarity determining
regions of anti-CD70 antibodies

| Antibody ID | CDRL1 | CDRL2 | CDRL3 |
|---|---|---|---|
| 31H1 | SEQ ID NO: 478 | SEQ ID NO: 479 | SEQ ID NO: 480 |
| 63B2 | SEQ ID NO: 481 | SEQ ID NO: 482 | SEQ ID NO: 483 |
| 40E3 | SEQ ID NO: 484 | SEQ ID NO: 485 | SEQ ID NO: 486 |
| 42C3 | SEQ ID NO: 487 | SEQ ID NO: 488 | SEQ ID NO: 489 |
| 45F11 | SEQ ID NO: 490 | SEQ ID NO: 491 | SEQ ID NO: 492 |
| 64F9 | SEQ ID NO: 493 | SEQ ID NO: 494 | SEQ ID NO: 495 |
| 72C2 | SEQ ID NO: 496 | SEQ ID NO: 497 | SEQ ID NO: 498 |
| 2F10 | SEQ ID NO: 499 | SEQ ID NO: 500 | SEQ ID NO: 501 |
| 4F11 | SEQ ID NO: 502 | SEQ ID NO: 503 | SEQ ID NO: 504 |
| 10H10 | SEQ ID NO: 505 | SEQ ID NO: 506 | SEQ ID NO: 507 |
| 17G6 | SEQ ID NO: 508 | SEQ ID NO: 509 | SEQ ID NO: 510 |
| 65E11 | SEQ ID NO: 511 | SEQ ID NO: 512 | SEQ ID NO: 513 |
| P02B10 | SEQ ID NO: 514 | SEQ ID NO: 515 | SEQ ID NO: 516 |
| P07D03 | SEQ ID NO: 517 | SEQ ID NO: 518 | SEQ ID NO: 519 |
| P08A02 | SEQ ID NO: 520 | SEQ ID NO: 521 | SEQ ID NO: 522 |
| P08E02 | SEQ ID NO: 523 | SEQ ID NO: 524 | SEQ ID NO: 525 |
| P08F08 | SEQ ID NO: 526 | SEQ ID NO: 527 | SEQ ID NO: 528 |
| P08G02 | SEQ ID NO: 529 | SEQ ID NO: 530 | SEQ ID NO: 531 |
| P12B09 | SEQ ID NO: 532 | SEQ ID NO: 533 | SEQ ID NO: 534 |
| P12F02 | SEQ ID NO: 535 | SEQ ID NO: 536 | SEQ ID NO: 537 |
| P12G07 | SEQ ID NO: 538 | SEQ ID NO: 539 | SEQ ID NO: 540 |
| P13F04 | SEQ ID NO: 541 | SEQ ID NO: 542 | SEQ ID NO: 543 |
| P15D02 | SEQ ID NO: 544 | SEQ ID NO: 545 | SEQ ID NO: 546 |
| P16C05 | SEQ ID NO: 547 | SEQ ID NO: 548 | SEQ ID NO: 549 |
| 10A1 | SEQ ID NO: 550 | SEQ ID NO: 551 | SEQ ID NO: 552 |
| 10E2 | SEQ ID NO: 553 | SEQ ID NO: 554 | SEQ ID NO: 555 |
| 11A1 | SEQ ID NO: 556 | SEQ ID NO: 557 | SEQ ID NO: 558 |
| 11C1 | SEQ ID NO: 559 | SEQ ID NO: 560 | SEQ ID NO: 561 |
| 11D1 | SEQ ID NO: 562 | SEQ ID NO: 563 | SEQ ID NO: 564 |
| 11E1 | SEQ ID NO: 565 | SEQ ID NO: 566 | SEQ ID NO: 567 |
| 12A2 | SEQ ID NO: 568 | SEQ ID NO: 569 | SEQ ID NO: 570 |
| 12C4 | SEQ ID NO: 571 | SEQ ID NO: 572 | SEQ ID NO: 573 |
| 12C5 | SEQ ID NO: 574 | SEQ ID NO: 575 | SEQ ID NO: 576 |
| 12D3 | SEQ ID NO: 577 | SEQ ID NO: 578 | SEQ ID NO: 579 |
| 12D6 | SEQ ID NO: 580 | SEQ ID NO: 581 | SEQ ID NO: 582 |
| 12D7 | SEQ ID NO: 583 | SEQ ID NO: 584 | SEQ ID NO: 585 |
| 12F5 | SEQ ID NO: 586 | SEQ ID NO: 587 | SEQ ID NO: 588 |
| 12H4 | SEQ ID NO: 589 | SEQ ID NO: 590 | SEQ ID NO: 591 |
| 8C8 | SEQ ID NO: 592 | SEQ ID NO: 593 | SEQ ID NO: 594 |
| 8F7 | SEQ ID NO: 595 | SEQ ID NO: 596 | SEQ ID NO: 597 |
| 8F8 | SEQ ID NO: 598 | SEQ ID NO: 599 | SEQ ID NO: 600 |
| 9D8 | SEQ ID NO: 601 | SEQ ID NO: 602 | SEQ ID NO: 603 |
| 9E10 | SEQ ID NO: 604 | SEQ ID NO: 605 | SEQ ID NO: 606 |
| 9E5 | SEQ ID NO: 607 | SEQ ID NO: 608 | SEQ ID NO: 609 |
| 9F4 | SEQ ID NO: 610 | SEQ ID NO: 611 | SEQ ID NO: 612 |
| 9F8 | SEQ ID NO: 613 | SEQ ID NO: 614 | SEQ ID NO: 615 |
| 12C6 | SEQ ID NO: 616 | SEQ ID NO: 617 | SEQ ID NO: 618 |
| CD70-1 | SEQ ID NO: 1857 | SEQ ID NO: 1858 | SEQ ID NO: 1859 |
| CD70-2 | SEQ ID NO: 1860 | SEQ ID NO: 1861 | SEQ ID NO: 1862 |
| CD70-3 | SEQ ID NO: 1863 | SEQ ID NO: 1864 | SEQ ID NO: 1865 |
| CD70-4 | SEQ ID NO: 1866 | SEQ ID NO: 1867 | SEQ ID NO: 1868 |
| CD70-5 | SEQ ID NO: 1869 | SEQ ID NO: 1870 | SEQ ID NO: 1871 |
| CD70-6 | SEQ ID NO: 1872 | SEQ ID NO: 1873 | SEQ ID NO: 1874 |
| CD70-7 | SEQ ID NO: 1875 | SEQ ID NO: 1876 | SEQ ID NO: 1877 |
| CD70-8 | SEQ ID NO: 1878 | SEQ ID NO: 1879 | SEQ ID NO: 1880 |
| CD70-9 | SEQ ID NO: 1881 | SEQ ID NO: 1882 | SEQ ID NO: 1883 |
| CD70-10 | SEQ ID NO: 1884 | SEQ ID NO: 1885 | SEQ ID NO: 1886 |
| CD70-11 | SEQ ID NO: 1887 | SEQ ID NO: 1888 | SEQ ID NO: 1889 |
| CD70-12 | SEQ ID NO: 1890 | SEQ ID NO: 1891 | SEQ ID NO: 1892 |
| CD70-13 | SEQ ID NO: 1893 | SEQ ID NO: 1894 | SEQ ID NO: 1895 |
| CD70-14 | SEQ ID NO: 1896 | SEQ ID NO: 1897 | SEQ ID NO: 1898 |
| CD70-15 | SEQ ID NO: 1899 | SEQ ID NO: 1900 | SEQ ID NO: 1901 |
| CD70-16 | SEQ ID NO: 1902 | SEQ ID NO: 1903 | SEQ ID NO: 1904 |
| CD70-17 | SEQ ID NO: 1905 | SEQ ID NO: 1906 | SEQ ID NO: 1907 |
| CD70-18 | SEQ ID NO: 1908 | SEQ ID NO: 1909 | SEQ ID NO: 1910 |
| CD70-19 | SEQ ID NO: 1911 | SEQ ID NO: 1912 | SEQ ID NO: 1913 |
| CD70-20 | SEQ ID NO: 1914 | SEQ ID NO: 1915 | SEQ ID NO: 1916 |
| CD70-21 | SEQ ID NO: 1917 | SEQ ID NO: 1918 | SEQ ID NO: 1919 |
| CD70-22 | SEQ ID NO: 1920 | SEQ ID NO: 1921 | SEQ ID NO: 1922 |
| CD70-23 | SEQ ID NO: 1923 | SEQ ID NO: 1924 | SEQ ID NO: 1925 |
| CD70-24 | SEQ ID NO: 1926 | SEQ ID NO: 1927 | SEQ ID NO: 1928 |
| CD70-25 | SEQ ID NO: 1929 | SEQ ID NO: 1930 | SEQ ID NO: 1931 |
| CD70-26 | SEQ ID NO: 1932 | SEQ ID NO: 1933 | SEQ ID NO: 1934 |
| CD70-27 | SEQ ID NO: 1935 | SEQ ID NO: 1936 | SEQ ID NO: 1937 |
| CD70-28 | SEQ ID NO: 1938 | SEQ ID NO: 1939 | SEQ ID NO: 1940 |
| CD70-29 | SEQ ID NO: 1941 | SEQ ID NO: 1942 | SEQ ID NO: 1943 |
| CD70-30 | SEQ ID NO: 1944 | SEQ ID NO: 1945 | SEQ ID NO: 1946 |
| CD70-31 | SEQ ID NO: 1947 | SEQ ID NO: 1948 | SEQ ID NO: 1949 |
| CD70-32 | SEQ ID NO: 1950 | SEQ ID NO: 1951 | SEQ ID NO: 1952 |
| CD70-33 | SEQ ID NO: 1953 | SEQ ID NO: 1954 | SEQ ID NO: 1955 |
| CD70-34 | SEQ ID NO: 1956 | SEQ ID NO: 1957 | SEQ ID NO: 1958 |
| CD70-35 | SEQ ID NO: 1959 | SEQ ID NO: 1960 | SEQ ID NO: 1961 |
| CD70-36 | SEQ ID NO: 1962 | SEQ ID NO: 1963 | SEQ ID NO: 1964 |
| CD70-37 | SEQ ID NO: 1965 | SEQ ID NO: 1966 | SEQ ID NO: 1967 |
| CD70-38 | SEQ ID NO: 1968 | SEQ ID NO: 1969 | SEQ ID NO: 1970 |
| CD70-39 | SEQ ID NO: 1971 | SEQ ID NO: 1972 | SEQ ID NO: 1973 |
| CD70-40 | SEQ ID NO: 1974 | SEQ ID NO: 1975 | SEQ ID NO: 1976 |
| CD70-41 | SEQ ID NO: 1977 | SEQ ID NO: 1978 | SEQ ID NO: 1979 |
| CD70-42 | SEQ ID NO: 1980 | SEQ ID NO: 1981 | SEQ ID NO: 1982 |
| CD70-43 | SEQ ID NO: 1983 | SEQ ID NO: 1984 | SEQ ID NO: 1985 |
| CD70-44 | SEQ ID NO: 1986 | SEQ ID NO: 1987 | SEQ ID NO: 1988 |
| CD70-45 | SEQ ID NO: 1989 | SEQ ID NO: 1990 | SEQ ID NO: 1991 |
| CD70-46 | SEQ ID NO: 1992 | SEQ ID NO: 1993 | SEQ ID NO: 1994 |
| CD70-47 | SEQ ID NO: 1995 | SEQ ID NO: 1996 | SEQ ID NO: 1997 |
| CD70-48 | SEQ ID NO: 1998 | SEQ ID NO: 1999 | SEQ ID NO: 2000 |
| CD70-49 | SEQ ID NO: 2001 | SEQ ID NO: 2002 | SEQ ID NO: 2003 |
| CD70-50 | SEQ ID NO: 2004 | SEQ ID NO: 2005 | SEQ ID NO: 2006 |
| CD70-51 | SEQ ID NO: 2007 | SEQ ID NO: 2008 | SEQ ID NO: 2009 |
| CD70-52 | SEQ ID NO: 2010 | SEQ ID NO: 2011 | SEQ ID NO: 2012 |
| CD70-53 | SEQ ID NO: 2013 | SEQ ID NO: 2014 | SEQ ID NO: 2015 |
| CD70-54 | SEQ ID NO: 2016 | SEQ ID NO: 2017 | SEQ ID NO: 2018 |
| CD70-55 | SEQ ID NO: 2019 | SEQ ID NO: 2020 | SEQ ID NO: 2021 |
| CD70-56 | SEQ ID NO: 2022 | SEQ ID NO: 2023 | SEQ ID NO: 2024 |
| CD70-57 | SEQ ID NO: 2025 | SEQ ID NO: 2026 | SEQ ID NO: 2027 |
| CD70-58 | SEQ ID NO: 2028 | SEQ ID NO: 2029 | SEQ ID NO: 2030 |
| CD70-59 | SEQ ID NO: 2031 | SEQ ID NO: 2032 | SEQ ID NO: 2033 |
| CD70-60 | SEQ ID NO: 2034 | SEQ ID NO: 2035 | SEQ ID NO: 2036 |
| CD70-61 | SEQ ID NO: 2037 | SEQ ID NO: 2038 | SEQ ID NO: 2039 |
| CD70-62 | SEQ ID NO: 2040 | SEQ ID NO: 2041 | SEQ ID NO: 2042 |
| CD70-63 | SEQ ID NO: 2043 | SEQ ID NO: 2044 | SEQ ID NO: 2045 |
| CD70-64 | SEQ ID NO: 2046 | SEQ ID NO: 2047 | SEQ ID NO: 2048 |
| CD70-65 | SEQ ID NO: 2049 | SEQ ID NO: 2050 | SEQ ID NO: 2051 |
| CD70-66 | SEQ ID NO: 2052 | SEQ ID NO: 2053 | SEQ ID NO: 2054 |
| CD70-67 | SEQ ID NO: 2055 | SEQ ID NO: 2056 | SEQ ID NO: 2057 |
| CD70-68 | SEQ ID NO: 2058 | SEQ ID NO: 2059 | SEQ ID NO: 2060 |
| CD70-69 | SEQ ID NO: 2061 | SEQ ID NO: 2062 | SEQ ID NO: 2063 |
| CD70-70 | SEQ ID NO: 2064 | SEQ ID NO: 2065 | SEQ ID NO: 2066 |
| CD70-71 | SEQ ID NO: 2067 | SEQ ID NO: 2068 | SEQ ID NO: 2069 |
| CD70-72 | SEQ ID NO: 2070 | SEQ ID NO: 2071 | SEQ ID NO: 2072 |
| CD70-73 | SEQ ID NO: 2073 | SEQ ID NO: 2074 | SEQ ID NO: 2075 |
| CD70-74 | SEQ ID NO: 2076 | SEQ ID NO: 2077 | SEQ ID NO: 2078 |
| CD70-75 | SEQ ID NO: 2079 | SEQ ID NO: 2080 | SEQ ID NO: 2081 |
| CD70-76 | SEQ ID NO: 2082 | SEQ ID NO: 2083 | SEQ ID NO: 2084 |
| CD70-77 | SEQ ID NO: 2085 | SEQ ID NO: 2086 | SEQ ID NO: 2087 |
| CD70-78 | SEQ ID NO: 2088 | SEQ ID NO: 2089 | SEQ ID NO: 2090 |
| CD70-79 | SEQ ID NO: 2091 | SEQ ID NO: 2092 | SEQ ID NO: 2093 |
| CD70-80 | SEQ ID NO: 2094 | SEQ ID NO: 2095 | SEQ ID NO: 2096 |
| CD70-81 | SEQ ID NO: 2097 | SEQ ID NO: 2098 | SEQ ID NO: 2099 |
| CD70-82 | SEQ ID NO: 2100 | SEQ ID NO: 2101 | SEQ ID NO: 2102 |
| CD70-83 | SEQ ID NO: 2103 | SEQ ID NO: 2104 | SEQ ID NO: 2105 |
| CD70-84 | SEQ ID NO: 2106 | SEQ ID NO: 2107 | SEQ ID NO: 2108 |
| CD70-85 | SEQ ID NO: 2109 | SEQ ID NO: 2110 | SEQ ID NO: 2111 |
| CD70-86 | SEQ ID NO: 2112 | SEQ ID NO: 2113 | SEQ ID NO: 2114 |
| CD70-87 | SEQ ID NO: 2115 | SEQ ID NO: 2116 | SEQ ID NO: 2117 |
| CD70-88 | SEQ ID NO: 2118 | SEQ ID NO: 2119 | SEQ ID NO: 2120 |
| CD70-89 | SEQ ID NO: 2121 | SEQ ID NO: 2122 | SEQ ID NO: 2123 |
| CD70-90 | SEQ ID NO: 2124 | SEQ ID NO: 2125 | SEQ ID NO: 2126 |
| CD70-91 | SEQ ID NO: 2127 | SEQ ID NO: 2128 | SEQ ID NO: 2129 |
| CD70-92 | SEQ ID NO: 2130 | SEQ ID NO: 2131 | SEQ ID NO: 2132 |
| CD70-93 | SEQ ID NO: 2133 | SEQ ID NO: 2134 | SEQ ID NO: 2135 |
| CD70-94 | SEQ ID NO: 2136 | SEQ ID NO: 2137 | SEQ ID NO: 2138 |
| CD70-95 | SEQ ID NO: 2139 | SEQ ID NO: 2140 | SEQ ID NO: 2141 |
| CD70-96 | SEQ ID NO: 2142 | SEQ ID NO: 2143 | SEQ ID NO: 2144 |
| CD70-97 | SEQ ID NO: 2145 | SEQ ID NO: 2146 | SEQ ID NO: 2147 |
| CD70-98 | SEQ ID NO: 2148 | SEQ ID NO: 2149 | SEQ ID NO: 2150 |
| CD70-99 | SEQ ID NO: 2151 | SEQ ID NO: 2152 | SEQ ID NO: 2153 |
| CD70-100 | SEQ ID NO: 2154 | SEQ ID NO: 2155 | SEQ ID NO: 2156 |
| CD70-101 | SEQ ID NO: 2157 | SEQ ID NO: 2158 | SEQ ID NO: 2159 |
| CD70-102 | SEQ ID NO: 2160 | SEQ ID NO: 2161 | SEQ ID NO: 2162 |
| CD70-103 | SEQ ID NO: 2163 | SEQ ID NO: 2164 | SEQ ID NO: 2165 |
| CD70-104 | SEQ ID NO: 2166 | SEQ ID NO: 2167 | SEQ ID NO: 2168 |
| CD70-105 | SEQ ID NO: 2169 | SEQ ID NO: 2170 | SEQ ID NO: 2171 |
| CD70-106 | SEQ ID NO: 2172 | SEQ ID NO: 2173 | SEQ ID NO: 2174 |
| CD70-107 | SEQ ID NO: 2175 | SEQ ID NO: 2176 | SEQ ID NO: 2177 |
| CD70-108 | SEQ ID NO: 2178 | SEQ ID NO: 2179 | SEQ ID NO: 2180 |
| CD70-109 | SEQ ID NO: 2181 | SEQ ID NO: 2182 | SEQ ID NO: 2183 |
| CD70-110 | SEQ ID NO: 2184 | SEQ ID NO: 2185 | SEQ ID NO: 2186 |
| CD70-111 | SEQ ID NO: 2187 | SEQ ID NO: 2188 | SEQ ID NO: 2189 |
| CD70-112 | SEQ ID NO: 2190 | SEQ ID NO: 2191 | SEQ ID NO: 2192 |
| CD70-113 | SEQ ID NO: 2193 | SEQ ID NO: 2194 | SEQ ID NO: 2195 |
| CD70-114 | SEQ ID NO: 2196 | SEQ ID NO: 2197 | SEQ ID NO: 2198 |
| CD70-115 | SEQ ID NO: 2199 | SEQ ID NO: 2200 | SEQ ID NO: 2201 |
| CD70-116 | SEQ ID NO: 2202 | SEQ ID NO: 2203 | SEQ ID NO: 2204 |
| CD70-117 | SEQ ID NO: 2205 | SEQ ID NO: 2206 | SEQ ID NO: 2207 |
| CD70-118 | SEQ ID NO: 2208 | SEQ ID NO: 2209 | SEQ ID NO: 2210 |
| CD70-119 | SEQ ID NO: 2211 | SEQ ID NO: 2212 | SEQ ID NO: 2213 |
| CD70-120 | SEQ ID NO: 2214 | SEQ ID NO: 2215 | SEQ ID NO: 2216 |
| CD70-121 | SEQ ID NO: 2217 | SEQ ID NO: 2218 | SEQ ID NO: 2219 |
| CD70-122 | SEQ ID NO: 2220 | SEQ ID NO: 2221 | SEQ ID NO: 2222 |
| CD70-123 | SEQ ID NO: 2223 | SEQ ID NO: 2224 | SEQ ID NO: 2225 |
| CD70-124 | SEQ ID NO: 2226 | SEQ ID NO: 2227 | SEQ ID NO: 2228 |
| CD70-125 | SEQ ID NO: 2229 | SEQ ID NO: 2230 | SEQ ID NO: 2231 |
| CD70-126 | SEQ ID NO: 2232 | SEQ ID NO: 2233 | SEQ ID NO: 2234 |
| CD70-127 | SEQ ID NO: 2235 | SEQ ID NO: 2236 | SEQ ID NO: 2237 |
| CD70-128 | SEQ ID NO: 2238 | SEQ ID NO: 2239 | SEQ ID NO: 2240 |
| CD70-129 | SEQ ID NO: 2241 | SEQ ID NO: 2242 | SEQ ID NO: 2243 |
| CD70-130 | SEQ ID NO: 2244 | SEQ ID NO: 2245 | SEQ ID NO: 2246 |
| CD70-131 | SEQ ID NO: 2247 | SEQ ID NO: 2248 | SEQ ID NO: 2249 |
| CD70-132 | SEQ ID NO: 2250 | SEQ ID NO: 2251 | SEQ ID NO: 2252 |
| CD70-133 | SEQ ID NO: 2253 | SEQ ID NO: 2254 | SEQ ID NO: 2255 |
| CD70-134 | SEQ ID NO: 2256 | SEQ ID NO: 2257 | SEQ ID NO: 2258 |
| CD70-135 | SEQ ID NO: 2259 | SEQ ID NO: 2260 | SEQ ID NO: 2261 |
| CD70-136 | SEQ ID NO: 2262 | SEQ ID NO: 2263 | SEQ ID NO: 2264 |
| CD70-137 | SEQ ID NO: 2265 | SEQ ID NO: 2266 | SEQ ID NO: 2267 |
| CD70-138 | SEQ ID NO: 2268 | SEQ ID NO: 2269 | SEQ ID NO: 2270 |
| CD70-139 | SEQ ID NO: 2271 | SEQ ID NO: 2272 | SEQ ID NO: 2273 |
| CD70-140 | SEQ ID NO: 2274 | SEQ ID NO: 2275 | SEQ ID NO: 2276 |
| CD70-141 | SEQ ID NO: 2277 | SEQ ID NO: 2278 | SEQ ID NO: 2279 |
| CD70-142 | SEQ ID NO: 2280 | SEQ ID NO: 2281 | SEQ ID NO: 2282 |
| CD70-143 | SEQ ID NO: 2283 | SEQ ID NO: 2284 | SEQ ID NO: 2285 |
| CD70-144 | SEQ ID NO: 2286 | SEQ ID NO: 2287 | SEQ ID NO: 2288 |
| CD70-145 | SEQ ID NO: 2289 | SEQ ID NO: 2290 | SEQ ID NO: 2291 |
| CD70-146 | SEQ ID NO: 2292 | SEQ ID NO: 2293 | SEQ ID NO: 2294 |
| CD70-147 | SEQ ID NO: 2295 | SEQ ID NO: 2296 | SEQ ID NO: 2297 |
| CD70-148 | SEQ ID NO: 2298 | SEQ ID NO: 2299 | SEQ ID NO: 2300 |
| CD70-149 | SEQ ID NO: 2301 | SEQ ID NO: 2302 | SEQ ID NO: 2303 |
| CD70-150 | SEQ ID NO: 2304 | SEQ ID NO: 2305 | SEQ ID NO: 2306 |
| CD70-151 | SEQ ID NO: 2307 | SEQ ID NO: 2308 | SEQ ID NO: 2309 |
| CD70-152 | SEQ ID NO: 2310 | SEQ ID NO: 2311 | SEQ ID NO: 2312 |
| CD70-153 | SEQ ID NO: 2313 | SEQ ID NO: 2314 | SEQ ID NO: 2315 |
| CD70-154 | SEQ ID NO: 2316 | SEQ ID NO: 2317 | SEQ ID NO: 2318 |
| CD70-155 | SEQ ID NO: 2319 | SEQ ID NO: 2320 | SEQ ID NO: 2321 |
| CD70-156 | SEQ ID NO: 2322 | SEQ ID NO: 2323 | SEQ ID NO: 2324 |
| CD70-157 | SEQ ID NO: 2325 | SEQ ID NO: 2326 | SEQ ID NO: 2327 |
| CD70-158 | SEQ ID NO: 2328 | SEQ ID NO: 2329 | SEQ ID NO: 2330 |
| CD70-159 | SEQ ID NO: 2331 | SEQ ID NO: 2332 | SEQ ID NO: 2333 |
| CD70-160 | SEQ ID NO: 2334 | SEQ ID NO: 2335 | SEQ ID NO: 2336 |
| CD70-161 | SEQ ID NO: 2337 | SEQ ID NO: 2338 | SEQ ID NO: 2339 |
| CD70-162 | SEQ ID NO: 2340 | SEQ ID NO: 2341 | SEQ ID NO: 2342 |
| CD70-163 | SEQ ID NO: 2343 | SEQ ID NO: 2344 | SEQ ID NO: 2345 |
| CD70-164 | SEQ ID NO: 2346 | SEQ ID NO: 2347 | SEQ ID NO: 2348 |
| CD70-165 | SEQ ID NO: 2349 | SEQ ID NO: 2350 | SEQ ID NO: 2351 |
| CD70-166 | SEQ ID NO: 2352 | SEQ ID NO: 2353 | SEQ ID NO: 2354 |
| CD70-167 | SEQ ID NO: 2355 | SEQ ID NO: 2356 | SEQ ID NO: 2357 |
| CD70-168 | SEQ ID NO: 2358 | SEQ ID NO: 2359 | SEQ ID NO: 2360 |
| CD70-169 | SEQ ID NO: 2361 | SEQ ID NO: 2362 | SEQ ID NO: 2363 |
| CD70-170 | SEQ ID NO: 2364 | SEQ ID NO: 2365 | SEQ ID NO: 2366 |
| CD70-171 | SEQ ID NO: 2367 | SEQ ID NO: 2368 | SEQ ID NO: 2369 |
| CD70-172 | SEQ ID NO: 2370 | SEQ ID NO: 2371 | SEQ ID NO: 2372 |
| CD70-173 | SEQ ID NO: 2373 | SEQ ID NO: 2374 | SEQ ID NO: 2375 |
| CD70-174 | SEQ ID NO: 2376 | SEQ ID NO: 2377 | SEQ ID NO: 2378 |
| CD70-175 | SEQ ID NO: 2379 | SEQ ID NO: 2380 | SEQ ID NO: 2381 |
| CD70-176 | SEQ ID NO: 2382 | SEQ ID NO: 2383 | SEQ ID NO: 2384 |
| CD70-177 | SEQ ID NO: 2385 | SEQ ID NO: 2386 | SEQ ID NO: 2387 |
| CD70-178 | SEQ ID NO: 2388 | SEQ ID NO: 2389 | SEQ ID NO: 2390 |
| CD70-179 | SEQ ID NO: 2391 | SEQ ID NO: 2392 | SEQ ID NO: 2393 |
| CD70-180 | SEQ ID NO: 2394 | SEQ ID NO: 2395 | SEQ ID NO: 2396 |
| 1C2 | SEQ ID NO: 2397 | SEQ ID NO: 2398 | SEQ ID NO: 2399 |
| 9D1 | SEQ ID NO: 2400 | SEQ ID NO: 2401 | SEQ ID NO: 2402 |
| 8B12 | SEQ ID NO: 2403 | SEQ ID NO: 2404 | SEQ ID NO: 2405 |
| 8C12 | SEQ ID NO: 2406 | SEQ ID NO: 2407 | SEQ ID NO: 2408 |
| 9E1 | SEQ ID NO: 2409 | SEQ ID NO: 2410 | SEQ ID NO: 2411 |
| 5F4 | SEQ ID NO: 2412 | SEQ ID NO: 2413 | SEQ ID NO: 2414 |
| 5B2 | SEQ ID NO: 2415 | SEQ ID NO: 2416 | SEQ ID NO: 2417 |
| 6D5 | SEQ ID NO: 2418 | SEQ ID NO: 2419 | SEQ ID NO: 2420 |
| 4D2 | SEQ ID NO: 2421 | SEQ ID NO: 2422 | SEQ ID NO: 2423 |
| 9A1 | SEQ ID NO: 2424 | SEQ ID NO: 2425 | SEQ ID NO: 2426 |
| 9G2 | SEQ ID NO: 2427 | SEQ ID NO: 2428 | SEQ ID NO: 2429 |
| 9B2 | SEQ ID NO: 2430 | SEQ ID NO: 2431 | SEQ ID NO: 2432 |
| 24E3 | SEQ ID NO: 2433 | SEQ ID NO: 2434 | SEQ ID NO: 2435 |
| 33D8 | SEQ ID NO: 2436 | SEQ ID NO: 2437 | SEQ ID NO: 2438 |
| 24F2 | SEQ ID NO: 2439 | SEQ ID NO: 2440 | SEQ ID NO: 2441 |
| 24B6 | SEQ ID NO: 2442 | SEQ ID NO: 2443 | SEQ ID NO: 2444 |
| 19G10 | SEQ ID NO: 2445 | SEQ ID NO: 2446 | SEQ ID NO: 2447 |
| 45B12 | SEQ ID NO: 2448 | SEQ ID NO: 2449 | SEQ ID NO: 2450 |
| 45D9 | SEQ ID NO: 2451 | SEQ ID NO: 2452 | SEQ ID NO: 2453 |
| 45F8 | SEQ ID NO: 2454 | SEQ ID NO: 2455 | SEQ ID NO: 2456 |
| 45A12 | SEQ ID NO: 2457 | SEQ ID NO: 2458 | SEQ ID NO: 2459 |
| 45B6 | SEQ ID NO: 2460 | SEQ ID NO: 2461 | SEQ ID NO: 2462 |
| 57B6 | SEQ ID NO: 2463 | SEQ ID NO: 2464 | SEQ ID NO: 2465 |
| 59D10 | SEQ ID NO: 2466 | SEQ ID NO: 2467 | SEQ ID NO: 2468 |
| 27B3 | SEQ ID NO: 2469 | SEQ ID NO: 2470 | SEQ ID NO: 2471 |
| 36A9 | SEQ ID NO: 2472 | SEQ ID NO: 2473 | SEQ ID NO: 2474 |
| 53F1 | SEQ ID NO: 2475 | SEQ ID NO: 2476 | SEQ ID NO: 2477 |
| 36D6 | SEQ ID NO: 2478 | SEQ ID NO: 2479 | SEQ ID NO: 2480 |
| 53G1 | SEQ ID NO: 2481 | SEQ ID NO: 2482 | SEQ ID NO: 2483 |
| 35G3 | SEQ ID NO: 2484 | SEQ ID NO: 2485 | SEQ ID NO: 2486 |
| 53C1 | SEQ ID NO: 2487 | SEQ ID NO: 2488 | SEQ ID NO: 2489 |
| 35F6 | SEQ ID NO: 2490 | SEQ ID NO: 2491 | SEQ ID NO: 2492 |
| 36G2 | SEQ ID NO: 2493 | SEQ ID NO: 2494 | SEQ ID NO: 2495 |
| 39D5 | SEQ ID NO: 2496 | SEQ ID NO: 2497 | SEQ ID NO: 2498 |
| 42D12 | SEQ ID NO: 2499 | SEQ ID NO: 2500 | SEQ ID NO: 2501 |
| 35C1 | SEQ ID NO: 2502 | SEQ ID NO: 2503 | SEQ ID NO: 2504 |
| 41D12 | SEQ ID NO: 2505 | SEQ ID NO: 2506 | SEQ ID NO: 2507 |
| 41H8 | SEQ ID NO: 2508 | SEQ ID NO: 2509 | SEQ ID NO: 2510 |
| 35G2 | SEQ ID NO: 2511 | SEQ ID NO: 2512 | SEQ ID NO: 2513 |
| 40F1 | SEQ ID NO: 2514 | SEQ ID NO: 2515 | SEQ ID NO: 2516 |
| 53B1 | SEQ ID NO: 2517 | SEQ ID NO: 2518 | SEQ ID NO: 2519 |
| 39C3 | SEQ ID NO: 2520 | SEQ ID NO: 2521 | SEQ ID NO: 2522 |
| 53D1 | SEQ ID NO: 2523 | SEQ ID NO: 2524 | SEQ ID NO: 2525 |
| 53H1 | SEQ ID NO: 2526 | SEQ ID NO: 2527 | SEQ ID NO: 2528 |
| 53A2 | SEQ ID NO: 2529 | SEQ ID NO: 2530 | SEQ ID NO: 2531 |
| ARGX-110 | SEQ ID NO: 2532 | SEQ ID NO: 2533 | SEQ ID NO: 2534 |
| CTX-130 | SEQ ID NO: 2535 | SEQ ID NO: 2536 | SEQ ID NO: 2537 |
| CTX-130 | SEQ ID NO: 2538 | SEQ ID NO: 2539 | SEQ ID NO: 2540 |
| 4SCAR70 | SEQ ID NO: 2541 | SEQ ID NO: 2542 | SEQ ID NO: 2543 |

[0213] C. Signal Peptides

[0214] In some embodiments, any of the CARs provided herein comprises a signal peptide (also known as a signal peptide, signal sequence, signal peptide sequence, leader peptide, and leader peptide sequence). In some embodiments, the antigen recognition domain of the CAR described herein comprises a signal peptide or a leader peptide sequence. Exemplary signal sequences include but are not limited to a CD27 signal sequence, CD8alpha signal sequence or a human IgG heavy chain signal sequence. In some embodiments, the CAR described herein does not comprise a signal peptide. In some embodiments, the NK cell or populations of NK cells provided herein comprise a CAR comprising a signal peptide. In some embodiments, the NK cell or populations of NK cell provided herein comprise a CAR that does not comprise a signal peptide.

[0215] In some embodiments, the CAR (e.g., the antigen recognition domain of the CAR) may comprise a human CD8alpha signal sequence comprising an amino acid sequence having at least 90%, 91%, 92%, 93%, 94%, 95%, 96%, 97%, 98%, 99% or 100% identity with the amino acid sequence of SEQ ID NO: 710.

[0216] In some embodiments, the CAR (e.g., the antigen recognition domain of the CAR) may comprise a human CD27 signal sequence comprising an amino acid sequence having at least 90%, 91%, 92%, 93%, 94%, 95%, 96%, 97%, 98%, 99% or 100% identity with the amino acid sequence of SEQ ID NO: 711.

[0217] In some embodiments, the CAR (e.g., the antigen recognition domain of the CAR) may comprise a human IgG heavy chain signal sequence comprising an amino acid sequence having at least 90%, 91%, 92%, 93%, 94%, 95%, 96%, 97%, 98%, 99% or 100% identity with the amino acid sequence of SEQ ID NO: 2544.

[0218] D. Hinge Domains

[0219] In some embodiments, a hinge domain (also known as a spacer region or a stalk region) is located between the antigen recognition domain and the transmembrane domain of the CAR. In particular, stalk regions are used to provide more flexibility and accessibility for the extracellular antigen recognition domain. In some embodiments, a hinge domain may comprise up to about 300 amino acids. In some embodiments, the hinge comprises about 10 to about 100 amino acids in length. In some embodiments, the hinge comprises about 25 to about 50 amino acids in length. In some embodiments, the hinge domain establishes an optimal effector-target inter membrane distance. In some embodiments, the hinge domain provides flexibility for antigen recognition domain to bind the target antigen. Any protein that is stable and/or dimerizes can serve this purpose.

[0220] A hinge domain may be derived from all or part of naturally occurring molecules, such as from all or part of the extracellular region of CD8, CD8alpha, CD4, CD28, 4-1BB, or IgG (in particular, the hinge domain of an IgG, for example from IgG1, IgG2, IgG3, or IgG4), or from all or part of an antibody heavy-chain constant region. Alternatively, the hinge domain may be a synthetic sequence that corresponds to a naturally occurring hinge sequence, or may be an entirely synthetic hinge sequence. In some embodiments, it corresponds to Fc domains of a human immunoglobulin, e.g., either the CH2 or CH3 domain. In some embodiments, the CH2 and CH3 hinge domains of a human immunoglobulin that has been modified to improve dimerization. In some embodiments, the hinge is a hinge portion of an immunoglobulin. In some embodiments, the hinge domain comprises a CH3 region of a human immunoglobulin. In some embodiments, the hinge domain comprises a CH2 and CH3 region of a human immunoglobulin. In some embodiments, the CH2 region comprises a human IgG1, IgG2 or IgG4 immunoglobulin CH2 region. In some embodiments, the hinge domain is from an IgG (e.g., IgG1, IgG2, IgG3 or IgG4) and the domain comprises one or more mutations (e.g., amino acid substitutions (e.g., in its CH2 domain) so as to prevent or reduce off-target binding of the hinge domain and/or a CAR comprising the hinge domain to an Fc receptor. In some embodiments, the hinge domain is derived from an IgG1, IgG2, IgG3, or IgG4 Fc region and includes one or more amino acid substitutions as compared to the wild-type protein from which the hinge domain was derived. In some embodiments, the hinge domain is derived from an IgG1, IgG2, IgG3, or IgG4 Fc region and includes one or more (e.g., two, three, four, five, six, seven, eight, nine, ten, eleven, twelve, thirteen, fourteen, fifteen, twenty, twenty-five, thirty, or more) amino acid substitutions at an amino acid residue at position 220, 226, 228, 229, 230, 233, 234, 235, 234, 237, 238, 239, 243, 247, 267, 268, 280, 290, 292, 297, 298, 299, 300, 305, 309, 318, 326, 330, 331, 332, 333, 334, 336, and/or 339 (amino acid residue positions indicated in the EU index proposed in Kabat et al. (1991) Sequences of Proteins of Immunological Interest, 5th Ed., United States Public Health Service, National Institutes of Health, Bethesda). In some embodiments, the hinge domain is derived from an IgG1, IgG2, IgG3, or IgG4 Fc region and includes one or more (e.g., two, three, four, five, six, seven, eight, nine, ten, eleven, twelve, thirteen, fourteen, fifteen, twenty, twenty-five, thirty, or more) of the following amino acid substitutions C220S, C226S, S228P, C229S, P230S, E233P, V234A, L234V, L234F, L234A, L235A, L235E, G236A, G237A, P238S, S239D, F243L, P247I, S267E, H268Q, S280H, K290S, K290E, K290N, R292P, N297A, N297Q, S298A, S298G, S298D, S298V, T299A, Y300L, V3051, V309L, E318A, K326A, K326W, K326E, L328F, A330L, A330S, A331S, P331S, 1332E, E333A, E333S, E333S, K334A, A339D, A339Q, and P396L. In some embodiments, the hinge domain is derived from an IgG1, IgG2, IgG3, or IgG4 Fc region and includes one or more of the following combinations of amino acid substitutions: S228P and L235E; S228P and N297Q; L235E and N297Q; S228P, L235E, and N297Q.

[0221] In some embodiments, the hinge domain is a part of human CD8α chain (e.g., NP_001139345.1). In some embodiments, the hinge domain of CARs described herein comprises a subsequence of CD8a, an IgG1, an IgG4, FcγRIIIα or CD28, in particular the hinge domain of any of a CD8a, an IgG1, an IgG4, FcγRIIIα or a CD28. In some embodiments, the stalk region comprises a human CD8α hinge, a human IgG1 hinge, a human IgG4 hinge, a human FcγRIIIα hinge, or a human CD28 hinge.

[0222] Any of the CARs provided herein may comprise a hinge domain described herein. In some embodiments, the hinge may comprise or consist of a human CD8alpha hinge domain comprising an amino acid sequence having at least 90%, 91%, 92%, 93%, 94%, 95%, 96%, 97%, 98%, 99% or 100% identity with the amino acid sequence of SEQ ID NO: 619. In some embodiments, the hinge may comprise or consist of a human CD8alpha hinge domain comprising an amino acid sequence having at least 90%, 91%, 92%, 93%, 94%, 95%, 96%, 97%, 98%, 99% or 100% identity with the amino acid sequence of SEQ ID NO: 2545. In some embodiments, the hinge may comprise or consist of a human IgG1 hinge domain comprising an amino acid sequence having at least 90%, 91%, 92%, 93%, 94%, 95%, 96%, 97%, 98%, 99% or 100% identity with the amino acid sequence of SEQ ID NO: 620. In some embodiments, the hinge may comprise or consist of a human IgG1 hinge domain comprising an amino acid sequence having at least 90%, 91%, 92%, 93%, 94%, 95%, 96%, 97%, 98%, 99% or 100% identity with the amino acid sequence of SEQ ID NO: 2546. In some embodiments, the hinge may comprise or consist of a human IgG4 hinge domain comprising an amino acid sequence having at least 90%, 91%, 92%, 93%, 94%, 95%, 96%, 97%, 98%, 99% or 100% identity with the amino acid sequence of SEQ ID NO: 696. In some embodiments, the hinge may comprise or consist of a human FcγRIIIα hinge domain comprising an amino acid sequence having at least 90%, 91%, 92%, 93%, 94%, 95%, 96%, 97%, 98%, 99% or 100% identity with the amino acid sequence of SEQ ID NO: 621. In some embodiments, the hinge may comprise or consist of a human CD28 hinge domain comprising an amino acid sequence having at least 90%, 91%, 92%, 93%, 94%, 95%, 96%, 97%, 98%, 99% or 100% identity with the amino acid sequence of SEQ ID NO: 2547. In some embodiments, the hinge may comprise or consist of an amino acid sequence having at least 90%, 91%, 92%, 93%, 94%, 95%, 96%, 97%, 98%, 99% or 100% identity to the amino acid sequence of any one of SEQ ID NOs: 2689-2694.

[0223] E. Transmembrane Domains

[0224] Suitable transmembrane domains for a CAR disclosed herein have the ability to (a) be expressed at the surface of a cell, which is in some embodiments an immune cell such as, for example a NK cell, and/or (b) interact with the ligand-binding domain and intracellular signaling domain for directing cellular response of an immune cell against a predefined target cell. The transmembrane domain can be derived either from a natural or from a synthetic source. The transmembrane domain can be derived from any membrane-bound or transmembrane protein. As non-limiting examples, the transmembrane domains can include the transmembrane region(s) of alpha, beta or zeta chain of the T-cell receptor; or a transmembrane region from CD8, CD8alpha, CD28, 2B4, NKG2D, CD16, CD3 zeta, CD3 epsilon, CD3 gamma, CD3 delta, CD45, CD4, CD5, CD9, CD22, CD27, CD28, CD33, CD37, CD64, CD80, CD86, CD134, CD137, CD154, ICOS/CD278, GITR/CD357, NKp44, NKp46, NKp30, DNAM-1, NKG2D, DAP, DAP10, DAP12 or erythropoietin receptor transmembrane domain or a portion of any of the foregoing or a combination of any of the foregoing. In some embodiments, the transmembrane domain comprises CD8alpha, CD16, CD28, 2B4, NKG2D, NKp44, NKp46, CD27, DAP10 or DAP12. In some embodiments, the transmembrane domain comprises a human CD8alpha transmembrane domain. In some embodiments, the transmembrane domain comprises a human CD16 transmembrane domain. In some embodiments, the transmembrane domain comprises a human CD28 transmembrane domain. In some embodiments, the transmembrane domain comprises a human NKG2D transmembrane domain. In some embodiments, the transmembrane domain comprises a human NKp44 transmembrane domain. In some embodiments, the transmembrane domain comprises a human NKp46 transmembrane domain. In some embodiments, the transmembrane domain comprises a human CD27 transmembrane domain. In some embodiments, the transmembrane domain comprises a human DAP10 transmembrane domain. In some embodiments, the transmembrane domain comprises a human DAP12 transmembrane domain.

[0225] Alternatively, the transmembrane domain can be synthetic, and can comprise hydrophobic residues such as leucine and valine. In some embodiments, a triplet of phenylalanine, tryptophan and valine is found at one or both termini of a synthetic transmembrane domain. Optionally, a short oligonucleotide or polypeptide linker, in some embodiments, between 2 and 10 amino acids in length may form the linkage between the transmembrane domain and the intracellular domain of a CAR. In some embodiments, the linker is a glycine-serine linker.

[0226] In some embodiments, the transmembrane domain of a CAR provided herein may comprise or consist of a human CD8alpha transmembrane domain comprising an amino acid sequence having at least 90%, 91%, 92%, 93%, 94%, 95%, 96%, 97%, 98%, 99% or 100% identity with the amino acid sequence of SEQ ID NO: 624.

[0227] In some embodiments, the transmembrane domain of a CAR provided herein may comprise or consist of a human CD8alpha transmembrane domain comprising an amino acid sequence having at least 90%, 91%, 92%, 93%, 94%, 95%, 96%, 97%, 98%, 99% or 100% identity with the amino acid sequence of SEQ ID NO: 2548.

[0228] In some embodiments, the transmembrane domain of a CAR provided herein may comprise or consist of a human CD28 transmembrane domain comprising an amino acid sequence having at least 90%, 91%, 92%, 93%, 94%, 95%, 96%, 97%, 98%, 99% or 100% identity with the amino acid sequence of SEQ ID NO: 625.

[0229] In some embodiments, the transmembrane domain of a CAR provided herein may comprise or consist of a human NKG2D transmembrane domain comprising an amino acid sequence having at least 90%, 91%, 92%, 93%, 94%, 95%, 96%, 97%, 98%, 99% or 100% identity with the amino acid sequence of SEQ ID NO: 626.

[0230] In some embodiments, the transmembrane domain of a CAR provided herein may comprise or consist of a human NKG2D transmembrane domain comprising an amino acid sequence having at least 90%, 91%, 92%, 93%, 94%, 95%, 96%, 97%, 98%, 99% or 100% identity with the amino acid sequence of SEQ ID NO: 2549.

[0231] In some embodiments, the transmembrane domain of a CAR provided herein may comprise or consist of a human CD16 transmembrane domain comprising an amino acid sequence having at least 90%, 91%, 92%, 93%, 94%, 95%, 96%, 97%, 98%, 99% or 100% identity with the amino acid sequence of SEQ ID NO: 627.

[0232] In some embodiments, the transmembrane domain of a CAR provided herein may comprise or consist of a human NKp44 transmembrane domain comprising an amino acid sequence having at least 90%, 91%, 92%, 93%, 94%, 95%, 96%, 97%, 98%, 99% or 100% identity with the amino acid sequence of SEQ ID NO: 697.

[0233] In some embodiments, the transmembrane domain of a CAR provided herein may comprise or consist of a human NKp46 transmembrane domain comprising an amino acid sequence having at least 90%, 91%, 92%, 93%, 94%, 95%, 96%, 97%, 98%, 99% or 100% identity with the amino acid sequence of SEQ ID NO: 698.

[0234] In some embodiments, the transmembrane domain of a CAR provided herein may comprise or consist of a human CD27 transmembrane domain comprising an amino acid sequence having at least 90%, 91%, 92%, 93%, 94%, 95%, 96%, 97%, 98%, 99% or 100% identity with the amino acid sequence of SEQ ID NO: 2550.

[0235] In some embodiments, the transmembrane domain of a CAR provided herein may comprise or consist of a human CD27 transmembrane domain comprising an amino acid sequence having at least 90%, 91%, 92%, 93%, 94%, 95%, 96%, 97%, 98%, 99% or 100% identity with the amino acid sequence of SEQ ID NO: 2551.

[0236] In some embodiments, the transmembrane domain of a CAR provided herein may comprise or consist of a human DAP12 transmembrane domain comprising an amino acid sequence having at least 90%, 91%, 92%, 93%, 94%, 95%, 96%, 97%, 98%, 99% or 100% identity with the amino acid sequence of SEQ ID NO: 2552.

[0237] In some embodiments, the transmembrane domain of a CAR provided herein may comprise or consist of a human DAP10 transmembrane domain comprising an amino acid sequence having at least 90%, 91%, 92%, 93%, 94%, 95%, 96%, 97%, 98%, 99% or 100% identity with the amino acid sequence of SEQ ID NO: 2553.

[0238] F. Costimulatory Domains

[0239] The intracellular domain of a CAR provided herein may comprise one or more costimulatory domains. Exemplary costimulatory domains include, but are not limited to a CD27, CD28, 4-IBB (CD137), ICOS, DAP10, DAP12, 2B4, OX40 (CD134), and OX40L costimulatory domain, or a fragment thereof, or a combination thereof. In some instances, a CAR described herein comprises one or more, or two or more of costimulatory domains selected from a CD27, CD28, 4-IBB (CD137), ICOS, DAP10, DAP12, 2B4, OX40 (CD134), and OX40L costimulatory domain, or a fragment thereof, or a combination thereof. In some embodiments, a CAR described herein comprises a CD28 costimulatory domain or a fragment thereof. In some embodiments, a CAR described herein comprises a 4-1BB (CD137) costimulatory domain or a fragment thereof. In some embodiments, a CAR described herein comprises a DAP10 costimulatory domain or a fragment thereof. In some embodiments, a CAR described herein comprises a DAP12 costimulatory domain or a fragment thereof. In some embodiments, a CAR described herein comprises a 2B4 costimulatory domain or a fragment thereof. In some embodiments, a CAR described herein comprises a OX40 costimulatory domain or a fragment thereof. In some embodiments, a CAR described herein comprises a OX40L costimulatory domain or a fragment thereof. In some embodiments, a CAR described herein comprises a ICOS costimulatory domain or a fragment thereof. In some embodiments, a CAR described herein comprises a CD27 costimulatory domain or fragment thereof.

[0240] In some embodiments, the costimulatory domain of a CAR provided herein may comprise or consist of a human CD28 costimulatory domain comprising an amino acid sequence having at least 90%, 91%, 92%, 93%, 94%, 95%, 96%, 97%, 98%, 99% or 100% identity with the amino acid sequence of SEQ ID NO: 628.

[0241] In some embodiments, the costimulatory domain of a CAR provided herein may comprise or consist of a human CD28 costimulatory domain comprising an amino acid sequence having at least 90%, 91%, 92%, 93%, 94%, 95%, 96%, 97%, 98%, 99% or 100% identity with the amino acid sequence of SEQ ID NO: 699.

[0242] In some embodiments, the costimulatory domain of a CAR provided herein may comprise or consist of a human 4-1BB costimulatory domain comprising an amino acid sequence having at least 90%, 91%, 92%, 93%, 94%, 95%, 96%, 97%, 98%, 99% or 100% identity with the amino acid sequence of SEQ ID NO: 629.

[0243] In some embodiments, the costimulatory domain of a CAR provided herein may comprise or consist of a human 4-1BB costimulatory domain comprising an amino acid sequence having at least 90%, 91%, 92%, 93%, 94%, 95%, 96%, 97%, 98%, 99% or 100% identity with the amino acid sequence of SEQ ID NO: 2554.

[0244] In some embodiments, the costimulatory domain of a CAR provided herein may comprise or consist of a human DAP10 costimulatory domain comprising an amino acid sequence having at least 90%, 91%, 92%, 93%, 94%, 95%, 96%, 97%, 98%, 99% or 100% identity with the amino acid sequence of SEQ ID NO: 630.

[0245] In some embodiments, the costimulatory domain of a CAR provided herein may comprise or consist of a human DAP10 costimulatory domain comprising an amino acid sequence having at least 90%, 91%, 92%, 93%, 94%, 95%, 96%, 97%, 98%, 99% or 100% identity with the amino acid sequence of SEQ ID NO: 2555.

[0246] In some embodiments, the costimulatory domain of a CAR provided herein may comprise or consist of a human DAP12 costimulatory domain comprising an amino acid sequence having at least 90%, 91%, 92%, 93%, 94%, 95%, 96%, 97%, 98%, 99% or 100% identity with the amino acid sequence of SEQ ID NO: 631.

[0247] In some embodiments, the costimulatory domain of a CAR provided herein may comprise or consist of a human 2B4 costimulatory domain comprising an amino acid sequence having at least 90%, 91%, 92%, 93%, 94%, 95%, 96%, 97%, 98%, 99% or 100% identity with the amino acid sequence of SEQ ID NO: 632.

[0248] In some embodiments, the costimulatory domain of a CAR provided herein may comprise or consist of a human OX40 costimulatory domain comprising an amino acid sequence having at least 90%, 91%, 92%, 93%, 94%, 95%, 96%, 97%, 98%, 99% or 100% identity with the amino acid sequence of SEQ ID NO: 2556.

[0249] In some embodiments, the costimulatory domain of a CAR provided herein may comprise or consist of a human OX40L costimulatory domain comprising an amino acid sequence having at least 90%, 91%, 92%, 93%, 94%, 95%, 96%, 97%, 98%, 99% or 100% identity with the amino acid sequence of SEQ ID NO: 2695.

[0250] In some embodiments, the costimulatory domain of a CAR provided herein may comprise or consist of a human CD27 costimulatory domain comprising an amino acid sequence having at least 90%, 91%, 92%, 93%, 94%, 95%, 96%, 97%, 98%, 99% or 100% identity with the amino acid sequence of SEQ ID NO: 2557.

[0251] In some embodiments, the costimulatory domain of a CAR provided herein may comprise or consist of a human CD27 costimulatory domain comprising an amino acid sequence having at least 90%, 91%, 92%, 93%, 94%, 95%, 96%, 97%, 98%, 99% or 100% identity with the amino acid sequence of SEQ ID NO: 2558.

[0252] G. Activation Domains

[0253] In some embodiments, the activation domain of a CAR disclosed herein is responsible for activation of at least one of the normal effector functions of the immune cell (e.g., NK cell) in which the CAR is expressed. The terms “intracellular signaling domain” or “intracellular domain” are used interchangeably and refer to a domain that comprises a co-stimulatory domain and/or an activation domain. The term “effector function” refers to a specialized function of a cell. Effector function of a T cell, for example, may be cytolytic activity or helper activity including the secretion of cytokines. The term “activation domain” refers to the portion of a protein which transduces the effector function signal and directs the cell to perform a specialized function. While usually an entire activation domain can be employed, in many cases it is not necessary to use the entire chain. To the extent that a truncated portion of the activation domain is used, such truncated portion may be used in place of the intact chain as long as it transduces the effector function signal. The term activation domain is thus meant to include any truncated portion of the activation domain sufficient to transduce the effector function signal. In some embodiments, the activation domain further comprises a signaling domain for T-cell activation and/or a signaling domain for NK cell activation. In some instances, the signaling domain for NK cell activation and/or T-cell activation comprises a domain derived from DAP12, TCR zeta, FcR gamma, FcR beta, FCER1G, FCGR2A, CD3 gamma, CD3 delta, CD3 epsilon, CD5, CD22, CD79a, CD79b or CD66d. In some embodiments, the CAR described herein comprises at least one (e.g., one, two, three, or more) activation domain selected from a DAP12, TCR zeta, FcR gamma, FcR beta, FCER1G, FCGR2A, CD3 gamma, CD3 delta, CD3 epsilon, CD5, CD22, CD79a, CD79b, CD66d activation domain, or a portion of any of the foregoing. In some embodiments, the CAR described herein has an activation domain comprising a domain derived from CD3 (CD3zeta). In some embodiments, the CAR described herein has an activation domain comprising a domain derived from FCER1G.

[0254] In some embodiments, the activation domain of a CAR described herein may comprise or consist of a CD3zeta activation domain (e.g., a human CD3zeta activation domain) comprising an amino acid sequence having at least 90%, 91%, 92%, 93%, 94%, 95%, 96%, 97%, 98%, 99% or 100% identity with the amino acid sequence of SEQ ID NO: 635. In some embodiments, the CD3zeta activation domain comprises a mutation in an ITAM domain. Examples of mutations in ITAM domains of CD3zeta are provided in Feucht et al., Nat Med. 2019; 25(1): 82-88. In some embodiments, each of the two tyrosine residues in one or more of ITAM1, ITAM2, or ITAM3 domains of the CD3zeta activation domain are point-mutated to a phenylalanine residue. In some embodiments, the CD3zeta activation domain comprises a deletion of one or more of the ITAM1, ITAM2, or ITAM3 domains.

[0255] In some embodiments, the activation domain of a CAR provided herein may comprise or consist of a human CD3zeta intracellular signaling domain comprising an amino acid sequence having at least 90%, 91%, 92%, 93%, 94%, 95%, 96%, 97%, 98%, 99% or 100% identity with the amino acid sequence of SEQ ID NO: 2559.

[0256] In some embodiments, the activation domain of a CAR provided herein may comprise or consist of a human FCER1G intracellular signaling domain comprising an amino acid sequence having at least 90%, 91%, 92%, 93%, 94%, 95%, 96%, 97%, 98%, 99% or 100% identity with the amino acid sequence of SEQ ID NO: 2560.

[0257] Included in the scope of the disclosure are nucleic acid sequences that encode functional portions of the CAR described herein. Functional portions encompass, for example, those parts of a CAR that retain the ability to recognize target cells, or detect, treat, or prevent a disease, to a similar extent, the same extent, or to a higher extent, as the parent CAR.

[0258] In embodiments, the CAR contains additional amino acids at the amino or carboxy terminus of the portion, or at both termini, which additional amino acids are not found in the amino acid sequence of the parent CAR. Desirably, the additional amino acids do not interfere with the biological function of the functional portion, e.g., recognize target cells, detect cancer, treat or prevent cancer, etc. More desirably, the additional amino acids enhance the biological activity of the CAR, as compared to the biological activity of the parent CAR.

[0259] A CAR described herein include (including functional portions and functional variants thereof) glycosylated, amidated, carboxylated, phosphorylated, esterified, N-acylated, cyclized via, e.g., a disulfide bridge, or converted into an acid addition salt and/or optionally dimerized or polymerized.

[0260] Table 4 provides exemplary amino acid sequences of the domains which can be used in the CARs described herein. In some embodiments, a CAR provided herein comprises one or more domains described in Table 4, or a fragment or portion thereof.

TABLE 4
Exemplary Amino Acid Sequences of CAR Domains

| | | |
|---|---|---|
| | | SEQ ID |
| Exemplary CAR domains | Amino Acid Sequence | NO: |

SIGNAL PEPTIDE

| | | |
|---|---|---|
| human CD8α signal sequence | MALPVTALLLPLALLLHAARP | 710 |
| human CD27 signal sequence | MARPHPWWLCVLGTLVGLS | 711 |
| human IgG heavy chain signal | MEFGLSWLFLVAILKGVQCSR | 2544 |
| sequence | | |

HINGES

| | | |
|---|---|---|
| human CD8α hinge domain | TTTPAPRPPTPAPTIASQPLSLRPEACRPAAGGAVHTRGLD | 619 |
| | FACD | |
| human CD8α hinge domain | FVPVFLPAKPTTTPAPRPPTPAPTIASQPLSLRPEACRPAA | 2545 |
| | GGAVHTRGLDFACD | |
| human IgG1 hinge domain | EPKSCDKTHTCPPCPAPELLGGPSVFLFPPKPKDTLMISRT | 620 |
| | PEVTCVVVDVSHEDPEVKFNWYVDGVEVHNAKTKPREEQYN | |
| | STYRVVSVLTVLHQDWLNGKEYKCKVSNKALPAPIEKTISK | |
| | AKGQPREPQVYTLPPSRDELTKNQVSLTCLVKGFYPSDIAV | |
| | EWESNGQPENNYKTTPPVLDSDGSFFLYSKLTVDKSRWQQG | |
| | NVFSCSVMHEALHNHYTQKSLSLSPGK | |
| human IgG1 hinge domain | EPKSCDKTHTCPPCPAPELLGGPSVFLFPPKPKDTLMISRT | 2546 |
| | PEVTCVVVDVSHEDPEVKFNWYVDGVEVHNAKTKPREEQYN | |
| | STYRVVSVLTVLHQDWLNGKEYKCKVSNKALPAPIEKTISK | |
| | AKGQPREPQVYTLPPSRDELTKNQVSLTCLVKGFYPSDIAV | |
| | EWESNGQPENNYKTTPPVLDSDGSFFLYSKLTVDKSRWQQG | |
| | NVFSCSVMHEALHNHYTQKSLSLSPGK | |
| human IgG4 hinge domain | ESKYGPPCPSCPAPEFLGGPSVFLFPPKPKDTLMISRTPEV | 696 |
| | TCVVVDVSQEDPEVQFNWYVDGVEVHNAKTKPREEQFNSTY | |
| | RVVSVLTVLHQDWLNGKEYKCKVSNKGLPSSIEKTISKAKG | |
| | QPREPQVYTLPPSQEEMTKNQVSLTCLVKGFYPSDIAVEWE | |
| | SNGQPENNYKTTPPVLDSDGSFFLYSRLTVDKSRWQEGNVF | |
| | SCSVMHEALHNHYTQKSLSLSLGK | |
| human FcγRIIIα hinge | GLAVSTISSFFPPGYQ | 621 |
| domain | | |
| CD28 hinge domain | IEVMYPPPYLDNEKSNGTIIHVKGKHLCPSPLFPGPS | 2547 |
| | KP | |
| IgG1 short hinge domain | AEPKSPDKTHTCPPCPKDP | 2689 |
| IgG4 short hinge domain | ESKYGPPCPSCP | 2690 |
| IgG4 hinge-CH3 | ESKYGPPCPSCPGQPREPQVYTLPPSQEEMTKNQVSLTCLV | 2691 |
| | KGFYPSDIAVEWESNGQPENNYKTTPPVLDSDGSFFLYSRL | |
| | TVDKSRWQEGNVFSCSVMHEALHNHYTQKSLSLSLGK | |
| IgG4 mutant hinge domain | ESKYGPPCPSCPAPEFEGGPSVFLFPPKPKDTLMISRTPEV | 2962 |
| | TCVVVDVSQEDPEVQFNWYVDGVEVHNAKTKPREEQFQSTY | |
| | RVVSVLTVLHQDWLNGKEYKCKVSNKGLPSSIEKTISKAKG | |
| | QPREPQVYTLPPSQEEMTKNQVSLTCLVKGFYPSDIAVEWE | |
| | SNGQPENNYKTTPPVLDSDGSFFLYSRLTVDKSRWQEGNVF | |
| | SCSVMHEALHNHYTQKSLSLSLGK | |
| IgG4 mutant-1 hinge domain | ESKYGPPCPSCPAPEFEGGPSVFLFPPKPKDTLMISRTPEV | 2693 |
| | TCVVVDVSQEDPEVQFNWYVDGVEVHNAKTKPREEQFNSTY | |
| | RVVSVLTVLHQDWLNGKEYKCKVSNKGLPSSIEKTISKAKG | |
| | QPREPQVYTLPPSQEEMTKNQVSLTCLVKGFYPSDIAVEWE | |
| | SNGQPENNYKTTPPVLDSDGSFFLYSRLTVDKSRWQEGNVF | |
| | SCSVMHEALHNHYTQKSLSLSLGK | |
| IgG4 mutant-2 hinge domain | ESKYGPPCPSCPAPEFLGGPSVFLFPPKPKDTLMISRTPEV | 2694 |
| | TCVVVDVSQEDPEVQFNWYVDGVEVHNAKTKPREEQFQSTY | |
| | RVVSVLTVLHQDWLNGKEYKCKVSNKGLPSSIEKTISKAKG | |
| | QPREPQVYTLPPSQEEMTKNQVSLTCLVKGFYPSDIAVEWE | |
| | SNGQPENNYKTTPPVLDSDGSFFLYSRLTVDKSRWQEGNVF | |
| | SCSVMHEALHNHYTQKSLSLSLGK | |

TRANSMEMBRANE DOMAINS

| | | |
|---|---|---|
| human CD8α transmembrane | IYIWAPLAGTCGVLLLSLVIT | 624 |
| domain | | |
| human CD8α transmembrane | IYIWAPLAGTCGVLLLSLVITLYCNHRN | 2548 |
| domain | | |
| human CD28 transmembrane | FWVLVVVGGVLACYSLLVTVAFIIFWV | 625 |
| domain | | |
| human NKG2D | VVRVLAIALAIRFTLNTLMWLAI | 626 |
| transmembrane domain | | |
| human NKG2D | PFFFCCFIAVAMGIRFIIMVAIWSAVFLNS | 2549 |
| transmembrane domain | | |
| human CD16 transmembrane | VSFCLVMVLLFAVDTGLYFSV | 627 |
| domain | | |
| human NKp44 | LVPVFCGLLVAKSLVLSALLV | 697 |
| transmembrane domain | | |
| human NKp46 | MGLAFLVLVALVWFLVEDWLS | 698 |
| transmembrane domain | | |
| human CD27 transmembrane | ILVIFSGMFLVFTLAGALFL | 2550 |
| domain | | |
| human CD27 transmembrane | ILVIFSGMFLVFTLAGALFLH | 2551 |
| domain | | |
| human DAP12 | GVLAGIVMGDLVLTVLIALAV | 2552 |
| transmembrane domain | | |
| human DAP10 | LLAGLVAADAVASLLIVGAVF | 2553 |
| transmembrane domain | | |

COSTIMULATORY DOMAINS

| | | |
|---|---|---|
| human CD28 costimulatory | RSKRSRGGHSDYMNMTPRRPGPTRKHYQPYAPPRDFAAYRS | 628 |
| domain | | |
| human CD28 costimulatory | RSKRSRLLHSDYMNMTPRRPGPTRKHYQPYAPPRDFAAYRS | 699 |
| domain | | |
| human 4-1BB costimulatory | KRGRKKLLYIFKQPFMRPVQTTQEEDGCSCRFPEEEEGGCE | 629 |
| domain | L | |
| human 4-1BB costimulatory | RKRGRKKLLYIFKQPFMRPVQTTQEEDGCSCRFPEEEEGGC | 2554 |
| domain | EL | |
| human DAP10 costimulatory | LCARPRRSPAQEDGKVYINMPGRG | 630 |
| domain | | |
| human DAP10 costimulatory | CARPRRSPAQEDGKVYINMPGRG | 2555 |
| domain | | |
| human DAP12 costimulatory | YFLGRLVPRGRGAAEAATRKQRITETESPYQELQGQRSDVY | 631 |
| domain | SDLNTQRPYYK | |
| human 2B4 costimulatory | WRRKRKEKQSETSPKEFLTIYEDVKDLKTRRNHEQEQTFPG | 632 |
| domain | GGSTIYSMIQSQSSAPTSQEPAYTLYSLIQPSRKSGSRKRN | |
| | HSPSFNSTIYEVIGKSQPKAQNPARLSRKELENFDVYS | |
| human OX40 costimulatory | ALYLLRRDQRLPPDAHKPPGGGSFRTPIQEEQADAHSTLAK | 2556 |
| domain | I | |
| human CD27 costimulatory | HQRRKYRSNKGESPVEPAEPCHYSCPREEEGSTIPIQEDYR | 2557 |
| domain | KPEPACSP | |
| human CD27 costimulatory | QRRKYRSNKGESPVEPAEPCHYSCPREEEGSTIPIQEDYRK | 2558 |
| domain | PEPACSP | |
| human OX40L costimulatory | ERVQPLEENVGNAARPRFERNK | 2695 |
| domain | | |

ACTIVATION DOMAINS

| | | |
|---|---|---|
| human CD3zeta intracellular | RVKFSRSADAPAYKQGQNQLYNELNLGRREEYDVLDKRRGR | 635 |
| signaling domain | DPEMGGKPRRKNPQEGLYNELQKDKMAEAYSEIGMKGERRR | |
| | GKGHDGLYQGLSTATKDTYDALHMQALPPR | |
| human CD3zeta intracellular | RVKFSRSADAPAYQQGQNQLYNELNLGRREEYDVLDKRRGR | 2559 |
| signaling domain | DPEMGGKPRRKNPQEGLYNELQKDKMAEAYSEIGMKGERRR | |
| | GKGHDGLYQGLSTATKDTYDALHMQALPPR | |
| human FCER1G intracellular | RLKIQVRKAAITSYEKSDGVYTGLSTRNQETYETLKHEKPP | 2560 |
| signaling domain | Q | |
| human FCGR2A | CRKKRISANSTDPVKAAQFEPPGRQMIAIRKRQLEETNNDY | 2642 |
| intracellular signaling | ETADGGYMTLNPRAPTDDDKNIYLTLPPNDHVNSNN | |
| domain | | |

[0261] H. Exemplary Anti-CD70 CAR Constructs

[0262] Disclosed herein are a chimeric antigen receptor (CAR), wherein the CAR comprises (a) an antigen recognition domain that specifically binds human CD70; (b) a hinge domain comprising or consisting of a CD8α (e.g., a human CD8α hinge domain), IgG1 (e.g., an IgG1 hinge domain or IgG1 short hinge domain), IgG4 (e.g., an IgG4 hinge domain, an IgG4 short hinge domain, an IgG4 hinge-CH3, IgG4 mutant hinge domain, an IgG4 mutant-1 hinge domain, or an IgG4 mutant-2 hinge domain) or CD28 hinge domain; (c) a transmembrane domain comprising or consisting of a CD16, CD27, CD28, CD8a (e.g., a, DAP10, DAP12, NKp44, NKp46, or NKG2D transmembrane domain; (d) a costimulatory domain comprising or consisting of a CD28, DAP10, DAP12, CD27, 4-1BB, 2B4, OX40 or OX40L costimulatory domain; optionally (e), a costimulatory signaling domain comprising or consisting of a CD28, DAP10, DAP12, CD27, 4-1BB, 2B4, OX40 or OX40L costimulatory domain; and optionally (f), an activation domain comprising or consisting of a CD3zeta or FCER1G activation domain. Also disclosed herein are nucleic acid sequences encoding said CARs and immune cells comprising said nucleic acids.

[0263] Table 5 provides exemplary anti-CD70 CAR constructs disclosed herein and the domains that they comprise. In some embodiments, an immune cell (e.g., an NK cell) or a population of immune cells (e.g., NK cells) described herein is genetically modified to express at least one of the exemplary anti-CD70 CAR constructs provided in Table 5. In some embodiments, an immune cell (e.g., an NK cell) or a population of immune cells (e.g., NK cells) comprises one of the exemplary anti-CD70 CAR constructs provided in Table 5.

TABLE 5
Exemplary anti-CD70 CAR constructs and domains

| | Signal | Antigen Recognition | | Transmembrane | Intracelllular | Intracellular | Intracellular |
|---|---|---|---|---|---|---|---|
| ID | Peptide (SP) | Domain (Binder) | Hinge Domain | (TM) Domain | Domain 1 | Domain 2 | Domain 3 |
| CAT-70-001 | CD8α SP | CD70 scFv (1F6) | CD8α hinge | CD28 | CD28 | CD3z | — |
| CAT-70-002 | CD8α SP | CD70 scFv (1F6) | CD8α hinge | NKG2D | DAP10 | CD3z | — |
| CAT-70-003 | CD8α SP | CD70 scFv (1F6) | CD8α hinge | NKG2D | DAP12 | CD3z | — |
| CAT-70-004 | CD27 SP | CD27 | — | CD27 | CD27 | CD3z | — |
| (Construct #1) | | extracellular | | | | | |
| | | domain (ECD) | | | | | |
| CAT-70-005 | CD27 SP | CD27 ECD | — | CD28 | CD28 | CD3z | — |
| CAT-70-006 | CD27 SP | CD27 ECD | — | NKG2D | DAP10 | CD3z | — |
| CAT-70-007 | CD27 SP | CD27 ECD | — | NKG2D | DAP12 | CD3z | — |
| CAT-CD70-119 | CD27 SP | CD27 ECD | — | CD27 | 4-1BB | CD3z | — |
| CAT-CD70-122 | CD27 SP | CD27 ECD | CD8α hinge | CD8a | 4-1BB | CD3z | — |
| CAT-CD70-124 | CD27 SP | CD27 ECD | — | CD27 | CD28 | CD3z | — |
| CAT-CD70-125 | CD27 SP | CD27 ECD | CD8α hinge | CD8a | CD28 | CD3z | — |
| CAT-CD70-127 | CD8α SP | CD70 scFv (1F6) | CD8α hinge | CD8a | 4-1BB | CD3z | — |
| (Construct #2) | | | | | | | |
| CAT-CD70-130 | CD8α SP | CD70 scFv (1F6) | IgG1 hinge | CD28 | CD28 | CD3z | — |
| CAT-CD70-133 | CD8α SP | CD70 scFv (1F6) | CD28 hinge | CD28 | CD28 | CD3z | — |
| CAT-CD70-135 | CD8α SP | CD70 scFv (1F6) | CD8α hinge | CD8a | CD28 | CD3z | — |
| CAT-CD70-136 | CD27 SP | CD27 ECD | — | CD27 | CD27 | DAP12 | — |
| CAT-CD70-137 | CD27 SP | CD27 ECD | — | CD27 | CD27 | FCER1G | — |
| CAT-CD70-140 | CD27 SP | CD27 ECD | — | DAP10 | DAP10 | CD3z | — |
| CAT-CD70-141 | CD27 SP | CD27 ECD | — | DAP12 | DAP12 | CD3z | — |
| CAT-CD70-142 | CD27 SP | CD27 ECD | — | DAP12 | DAP12 | — | — |
| CAT-CD70-143 | CD8α SP | CD70 scFv (1F6) | IgG1 hinge | CD28 | CD28 | — | — |
| CAT-CD70-144 | CD8α SP | CD70 scFv (1F6) | CD8α hinge | CD8a | 4-1BB | — | — |
| CAT-CD70-145 | CD8α SP | CD70 scFv (1F6) | CD8α hinge | CD8a | — | CD3z | — |
| CAT-CD70-146 | CD8α SP | CD70 scFv (1F6) | CD8α hinge | CD8a | 4-1BB | 4-1BB | — |
| CAT-CD70-147 | CD8α SP | CD70 scFv (1F6) | CD8α hinge | CD8a | 2B4 | CD3z | — |
| CAT-CD70-148 | CD8α SP | CD70 scFv (1F6) | CD8α hinge | CD8a | DAP10 | CD3z | — |
| CAT-CD70-149 | CD8α SP | CD70 scFv (1F6) | CD8α hinge | CD8a | DAP12 | CD3z | — |
| CAT-CD70-150 | CD8α SP | CD70 scFv (1F6) | CD8α hinge | CD8a | OX40 | CD3z | — |
| CAT-CD70-153 | CD8α SP | CD70 scFv (1F6) | CD8α hinge | NKG2D | 2B4 | CD3z | — |
| CAT-CD70-154 | CD8α SP | CD70 scFv (1F6) | CD8α hinge | DAP10 | DAP10 | CD3z | — |
| CAT-CD70-155 | CD8α SP | CD70 scFv (1F6) | CD8α hinge | DAP12 | DAP12 | CD3z | — |
| CAT-CD70-156 | CD8α SP | CD70 scFv (1F6) | CD8α hinge | DAP12 | DAP12 | — | — |
| CAT-CD70-157 | CD8α SP | CD70 scFv (1F6) | CD8α hinge | CD28 | CD28 | DAP12 | — |
| CAT-CD70-158 | CD8α SP | CD70 scFv (1F6) | CD8α hinge | CD8a | 4-1BB | DAP12 | — |
| CAT-CD70-159 | CD8α SP | CD70 scFv (1F6) | CD8α hinge | CD8a | OX40 | DAP12 | — |
| CAT-CD70-160 | CD8α SP | CD70 scFv (1F6) | CD8α hinge | CD8a | DAP10 | DAP12 | — |
| CAT-CD70-161 | CD8α SP | CD70 scFv (1F6) | CD8α hinge | CD28 | CD28 | FCER1G | — |
| CAT-CD70-162 | CD8α SP | CD70 scFv (1F6) | CD8α hinge | CD8a | 4-1BB | FCER1G | — |
| CAT-CD70-163 | CD8α SP | CD70 scFv (1F6) | CD8α hinge | CD8a | OX40 | FCER1G | — |
| CAT-CD70-164 | CD8α SP | CD70 scFv (1F6) | CD8α hinge | CD8a | DAP10 | FCER1G | — |
| CAT-CD70-278 | CD8α SP | CD70 scFv (1F6) | CD8a short | CD8a | 4-1BB | CD3z | — |
| CAT-CD70-127 | CD8α SP | CD70 scFv (1F6) | CD8α hinge | CD8a | 4-1BB | CD3z | — |
| CAT-CD70-291 | CD8α SP | CD70 scFv (1F6) | IgG1 short hinge | CD8a | 4-1BB | CD3z | — |
| CAT-CD70-281 | CD8α SP | CD70 scFv (1F6) | IgG4 short hinge | CD8a | 4-1BB | CD3z | — |
| CAT-CD70-280 | CD8α SP | CD70 scFv (1F6) | IgG4 hinge-CH3 | CD8a | 4-1BB | CD3z | — |
| CAT-CD70-279 | CD8α SP | CD70 scFv (1F6) | IgG4 hinge- | CD8a | 4-1BB | CD3z | — |
| | | | CH2—CH3 | | | | |
| CAT-CD70-293 | CD8α SP | CD70 scFv (1F6) | IgG4 mutant | CD8a | 4-1BB | CD3z | — |
| CAT-CD70-294 | CD8α SP | CD70 scFv (1F6) | CD8a short | CD8a | DAP10 | CD3z | — |
| CAT-CD70-148 | CD8α SP | CD70 scFv (1F6) | CD8α hinge | CD8a | DAP10 | CD3z | — |
| CAT-CD70-295 | CD8α SP | CD70 scFv (1F6) | IgG1 short hinge | CD8a | DAP10 | CD3z | — |
| CAT-CD70-296 | CD8α SP | CD70 scFv (1F6) | IgG4 short | CD8a | DAP10 | CD3z | — |
| CAT-CD70-297 | CD8α SP | CD70 scFv (1F6) | IgG4 hinge-CH3 | CD8a | DAP10 | CD3z | — |
| CAT-CD70-298 | CD8α SP | CD70 scFv (1F6) | IgG4 hinge- | CD8a | DAP10 | CD3z | — |
| | | | CH2—CH3 | | | | |
| CAT-CD70-299 | CD8α SP | CD70 scFv (1F6) | IgG4 mutant | CD8a | DAP10 | CD3z | — |
| CAT-CD70-300 | CD8α SP | CD70 scFv (1F6) | CD8a short | CD8a | OX40 | CD3z | — |
| CAT-CD70-150 | CD8α SP | CD70 scFv (1F6) | CD8α hinge | CD8a | OX40 | CD3z | — |
| CAT-CD70-301 | CD8α SP | CD70 scFv (1F6) | IgG1 short hinge | CD8a | OX40 | CD3z | — |
| CAT-CD70-302 | CD8α SP | CD70 scFv (1F6) | IgG4 short | CD8a | OX40 | CD3z | — |
| CAT-CD70-303 | CD8α SP | CD70 scFv (1F6) | IgG4 hinge-CH3 | CD8a | OX40 | CD3z | — |
| CAT-CD70-304 | CD8α SP | CD70 scFv (1F6) | IgG4 hinge- | CD8a | OX40 | CD3z | — |
| | | | CH2—CH3 | | | | |
| CAT-CD70-305 | CD8α SP | CD70 scFv (1F6) | IgG4 mutant | CD8a | OX40 | CD3z | — |
| CAT-CD70-306 | CD8α SP | CD70 scFv (1F6) | CD8a short | CD28 | CD28 | DAP12 | — |
| CAT-CD70-157 | CD8α SP | CD70 scFv (1F6) | CD8α hinge | CD28 | CD28 | DAP12 | — |
| CAT-CD70-307 | CD8α SP | CD70 scFv (1F6) | IgG1 short hinge | CD28 | CD28 | DAP12 | — |
| CAT-CD70-308 | CD8α SP | CD70 scFv (1F6) | IgG4 short | CD28 | CD28 | DAP12 | — |
| CAT-CD70-309 | CD8α SP | CD70 scFv (1F6) | IgG4 hinge-CH3 | CD28 | CD28 | DAP12 | — |
| CAT-CD70-310 | CD8α SP | CD70 scFv (1F6) | IgG4 hinge- | CD28 | CD28 | DAP12 | — |
| | | | CH2—CH3 | | | | |
| CAT-CD70-311 | CD8α SP | CD70 scFv (1F6) | IgG4 mutant | CD28 | CD28 | DAP12 | — |
| CAT-CD70-312 | CD8α SP | CD70 scFv (1F6) | CD8a short | CD28 | CD28 | CD3z | — |
| CAT-CD70-134 | CD8α SP | CD70 scFv (1F6) | CD8α hinge | CD28 | CD28 | CD3z | — |
| CAT-CD70-360 | CD8α SP | CD70 scFv (1F6) | IgG1 short hinge | CD28 | CD28 | CD3z | — |
| CAT-CD70-313 | CD8α SP | CD70 scFv (1F6) | IgG4 short | CD28 | CD28 | CD3z | — |
| CAT-CD70-314 | CD8α SP | CD70 scFv (1F6) | IgG4 hinge-CH3 | CD28 | CD28 | CD3z | — |
| CAT-CD70-315 | CD8α SP | CD70 scFv (1F6) | IgG4 hinge- | CD28 | CD28 | CD3z | — |
| | | | CH2—CH3 | | | | |
| CAT-CD70-316 | CD8α SP | CD70 scFv (1F6) | IgG4 mutant | CD28 | CD28 | CD3z | — |
| CAT-CD70-317 | CD8α SP | CD70 scFv (1F6) | CD8a short | CD28 | CD28 | OX40L | CD3z |
| CAT-CD70-318 | CD8α SP | CD70 scFv (1F6) | CD8α hinge | CD28 | CD28 | OX40L | CD3z |
| CAT-CD70-319 | CD8α SP | CD70 scFv (1F6) | IgG1 short hinge | CD28 | CD28 | OX40L | CD3z |
| CAT-CD70-320 | CD8α SP | CD70 scFv (1F6) | IgG4 short | CD28 | CD28 | OX40L | CD3z |
| CAT-CD70-321 | CD8α SP | CD70 scFv (1F6) | IgG4 hinge-CH3 | CD28 | CD28 | OX40L | CD3z |
| CAT-CD70-322 | CD8α SP | CD70 scFv (1F6) | IgG4 hinge- | CD28 | CD28 | OX40L | CD3z |
| | | | CH2—CH3 | | | | |
| CAT-CD70-323 | CD8α SP | CD70 scFv (1F6) | IgG4 mutant | CD28 | CD28 | OX40L | CD3z |
| CAT-CD70-324 | CD8α SP | CD70 scFv (1F6) | CD8a short | CD8a | 2B4 | CD3z | — |
| CAT-CD70-147 | CD8α SP | CD70 scFv (1F6) | CD8α hinge | CD8a | 2B4 | CD3z | — |
| CAT-CD70-325 | CD8α SP | CD70 scFv (1F6) | IgG1 short hinge | CD8a | 2B4 | CD3z | — |
| CAT-CD70-326 | CD8α SP | CD70 scFv (1F6) | IgG4 short | CD8a | 2B4 | CD3z | — |
| CAT-CD70-327 | CD8α SP | CD70 scFv (1F6) | IgG4 hinge-CH3 | CD8a | 2B4 | CD3z | — |
| CAT-CD70-328 | CD8α SP | CD70 scFv (1F6) | IgG4 hinge- | CD8a | 2B4 | CD3z | — |
| | | | CH2—CH3 | | | | |
| CAT-CD70-329 | CD8α SP | CD70 scFv (1F6) | IgG4 mutant | CD8a | 2B4 | CD3z | — |
| CAT-CD70-330 | CD8α SP | CD70 scFv (1F6) | CD8α hinge | CD8a | DAP12 | CD3z | — |
| CAT-CD70-149 | CD8α SP | CD70 scFv (1F6) | CD8α hinge | CD8a | DAP12 | CD3z | — |
| CAT-CD70-331 | CD8α SP | CD70 scFv (1F6) | IgG1 short hinge | CD8a | DAP12 | CD3z | — |
| CAT-CD70-332 | CD8α SP | CD70 scFv (1F6) | IgG4 short | CD8a | DAP12 | CD3z | — |
| CAT-CD70-333 | CD8α SP | CD70 scFv (1F6) | IgG4 hinge-CH3 | CD8a | DAP12 | CD3z | — |
| CAT-CD70-334 | CD8α SP | CD70 scFv (1F6) | IgG4 hinge- | CD8a | DAP12 | CD3z | — |
| | | | CH2—CH3 | | | | |
| CAT-CD70-335 | CD8α SP | CD70 scFv (1F6) | IgG4 mutant | CD8a | DAP12 | CD3z | — |
| CAT-CD70-336 | CD8α SP | CD70 scFv (1F6) | CD8a short | CD8a | | CD3z | — |
| CAT-CD70-145 | CD8α SP | CD70 scFv (1F6) | CD8α hinge | CD8a | | CD3z | — |
| CAT-CD70-337 | CD8α SP | CD70 scFv (1F6) | IgG1 short hinge | CD8a | | CD3z | — |
| CAT-CD70-338 | CD8α SP | CD70 scFv (1F6) | IgG4 short | CD8a | | CD3z | — |
| CAT-CD70-339 | CD8α SP | CD70 scFv (1F6) | IgG4 hinge-CH3 | CD8a | | CD3z | — |
| CAT-CD70-340 | CD8α SP | CD70 scFv (1F6) | IgG4 hinge- | CD8a | | CD3z | — |
| | | | CH2—CH3 | | | | |
| CAT-CD70-341 | CD8α SP | CD70 scFv (1F6) | IgG4 mutant | CD8a | | CD3z | — |
| CAT-CD70-342 | CD8α SP | CD70 scFv (1F6) | CD8a short | CD8a | 4-1BB | DAP12 | — |
| CAT-CD70-158 | CD8α SP | CD70 scFv (1F6) | CD8α hinge | CD8a | 4-1BB | DAP12 | — |
| CAT-CD70-343 | CD8α SP | CD70 scFv (1F6) | IgG1 short hinge | CD8a | 4-1BB | DAP12 | — |
| CAT-CD70-344 | CD8α SP | CD70 scFv (1F6) | IgG4 short | CD8a | 4-1BB | DAP12 | — |
| CAT-CD70-345 | CD8α SP | CD70 scFv (1F6) | IgG4 hinge-CH3 | CD8a | 4-1BB | DAP12 | — |
| CAT-CD70-346 | CD8α SP | CD70 scFv (1F6) | IgG4 hinge- | CD8a | 4-1BB | DAP12 | — |
| | | | CH2—CH3 | | | | |
| CAT-CD70-347 | CD8α SP | CD70 scFv (1F6) | IgG4 mutant | CD8a | 4-1BB | DAP12 | — |
| CAT-CD70-348 | CD8α SP | CD70 scFv (1F6) | CD8a short | CD8a | OX40 | DAP12 | — |
| CAT-CD70-159 | CD8α SP | CD70 scFv (1F6) | CD8α hinge | CD8a | OX40 | DAP12 | — |
| CAT-CD70-349 | CD8α SP | CD70 scFv (1F6) | IgG1 short hinge | CD8a | OX40 | DAP12 | — |
| CAT-CD70-350 | CD8α SP | CD70 scFv (1F6) | IgG4 short | CD8a | OX40 | DAP12 | — |
| CAT-CD70-351 | CD8α SP | CD70 scFv (1F6) | IgG4 hinge-CH3 | CD8a | OX40 | DAP12 | — |
| CAT-CD70-352 | CD8α SP | CD70 scFv (1F6) | IgG4 hinge- | CD8a | OX40 | DAP12 | — |
| | | | CH2—CH3 | | | | |
| CAT-CD70-353 | CD8α SP | CD70 scFv (1F6) | IgG4 mutant | CD8a | OX40 | DAP12 | — |
| CAT-CD70-354 | CD8α SP | CD70 scFv (1F6) | CD8a short | CD28 | CD28 | FCER1G | — |
| CAT-CD70-161 | CD8α SP | CD70 scFv (1F6) | CD8α hinge | CD28 | CD28 | FCER1G | — |
| CAT-CD70-355 | CD8α SP | CD70 scFv (1F6) | IgG1 short hinge | CD28 | CD28 | FCER1G | — |
| CAT-CD70-356 | CD8α SP | CD70 scFv (1F6) | IgG4 short | CD28 | CD28 | FCER1G | — |
| CAT-CD70-357 | CD8α SP | CD70 scFv (1F6) | IgG4 hinge-CH3 | CD28 | CD28 | FCER1G | — |
| CAT-CD70-358 | CD8α SP | CD70 scFv (1F6) | IgG4 hinge- | CD28 | CD28 | FCER1G | — |
| | | | CH2—CH3 | | | | |
| CAT-CD70-359 | CD8α SP | CD70 scFv (1F6) | IgG4 mutant | CD28 | CD28 | FCER1G | — |

[0264] Table 6 provides exemplary sequences of the anti-CD70 CAR constructs disclosed herein. In some embodiments, an immune cell (e.g., NK cell) or population of immune cells (e.g., NK cells) described herein is genetically modified to express at least one of the exemplary anti-CD70 CAR constructs provided in Table 6. In some embodiments, the CAR of any one of SEQ ID NOs: 637, 639, 641, 643, 645, 647, 700, 2561-2593 does not comprise the indicated signal peptide. In some embodiments, an immune cell (e.g., NK cell) or population of immune cells (e.g., NK cells) described herein comprises a chimeric antigen receptor comprising an amino acid sequence that is at least 90%, at least 91%, at least 92%, at least 93%, at least 94%, at least 95%, at least 96%, at least 97%, at least 98%, at least 99% or at least 100% identical to the amino acid sequence of any one of SEQ ID NOs: 637, 639, 641, 643, 645, 647, 700, 2561-2593, 2697-2736 or 2737-2882.

TABLE 6
Exemplary sequences of anti-CD70 CAR constructs

| Exemplary CAR | | SEQ |
|---|---|---|
| Name and Domains | Amino Acid Sequence | ID NO: |
| CAT-70-001 | MALPVTALLLPLALLLHAARPQVQLVQSGAEVKKPGASVKVSCKASGYTFT | 637 |
| CD8α signal peptide, | NYGMNWVRQAPGQGLKWMGWINTYTGEPTYADAFKGRVTMTRDTSISTAYM | |
| CD70 scFv (1F6), | ELSRLRSDDTAVYYCARDYGDYGMDYWGQGTTVTVSSGGGGSGGGGSGGGG | |
| CD8α hinge, CD28 | SGDIVMTQSPDSLAVSLGERATINCRASKSVSTSGYSFMHWYQQKPGQPPK | |
| transmembrane domain, | LLIYLASNLESGVPDRFSGSGSGTDFTLTISSLQAEDVAVYYCQHSREVPW | |
| [symbol] | TFGQGTKVEIKFVPVFLPAKPTTTPAPRPPTPAPTIASQPLSLRPEACRPA | |
| [symbol] CD3z | AGGAVHTRGLDFACDFWVLVVVGGVLACYSLLVTVAFIIFWV [symbol] | |
| signaling domain | [symbol] [symbol] RVKFSRSADAPAYQQGQNQ | |
| | LYNELNLGRREEYDVLDKRRGRDPEMGGKPRRKNPQEGLYNELQKDKMAEA | |
| | YSEIGMKGERRRGKGHDGLYQGLSTATKDTYDALHMQALPPR | |
| CAT-70-002 | MALPVTALLLPLALLLHAARPQVQLVQSGAEVKKPGASVKVSCKASGYTFT | 639 |
| CD8α signal peptide, | NYGMNWVRQAPGQGLKWMGWINTYTGEPTYADAFKGRVTMTRDTSISTAYM | |
| CD70 scFv (1F6), | ELSRLRSDDTAVYYCARDYGDYGMDYWGQGTTVTVSSGGGGSGGGGSGGGG | |
| CD8α hinge, NKG2D | SGDIVMTQSPDSLAVSLGERATINCRASKSVSTSGYSFMHWYQQKPGQPPK | |
| transmembrane domain, | LLIYLASNLESGVPDRFSGSGSGTDFTLTISSLQAEDVAVYYCQHSREVPW | |
| [symbol] | TFGQGTKVEIKFVPVFLPAKPTTTPAPRPPTPAPTIASQPLSLRPEACRPA | |
| [symbol] CD3z | AGGAVHTRGLDFACDPFFFCCFIAVAMGIRFIIMVAIWSAVFLNS [symbol] | |
| signaling domain | [symbol] RVKFSRSADAPAYQQGQNQLYNELNLGRREEYD | |
| | VLDKRRGRDPEMGGKPRRKNPQEGLYNELQKDKMAEAYSEIGMKGERRRGK | |
| | GHDGLYQGLSTATKDTYDALHMQALPPR | |
| CAT-70-003 | MALPVTALLLPLALLLHAARPQVQLVQSGAEVKKPGASVKVSCKASGYTFT | 641 |
| CD8α signal peptide, | NYGMNWVRQAPGQGLKWMGWINTYTGEPTYADAFKGRVTMTRDTSISTAYM | |
| CD70 scFv (1F6), | ELSRLRSDDTAVYYCARDYGDYGMDYWGQGTTVTVSSGGGGSGGGGSGGGG | |
| CD8α hinge, NKG2D | SGDIVMTQSPDSLAVSLGERATINCRASKSVSTSGYSFMHWYQQKPGQPPK | |
| transmembrane domain, | LLIYLASNLESGVPDRFSGSGSGTDFTLTISSLQAEDVAVYYCQHSREVPW | |
| [symbol] | TFGQGTKVEIKFVPVFLPAKPTTTPAPRPPTPAPTIASQPLSLRPEACRPA | |
| [symbol] CD3z | AGGAVHTRGLDFACDPFFFCCFIAVAMGIRFIIMVAIWSAVFLNS [symbol] | |
| signaling domain | [symbol] [symbol] RVKFS | |
| | RSADAPAYQQGQNQLYNELNLGRREEYDVLDKRRGRDPEMGGKPRRKNPQE | |
| | GLYNELQKDKMAEAYSEIGMKGERRRGKGHDGLYQGLSTATKDTYDALHMQ | |
| | ALPPR | |
| CAT-70-004 | MARPHPWWLCVLGTLVGLSATPAPKSCPERHYWAQGKLCCQMCEPGTFLVK | 643 |
| (Construct #1) | DCDQHRKAAQCDPCIPGVSFSPDHHTRPHCESCRHCNSGLLVRNCTITANA | |
| CD27 signal peptide, | ECACRNGWQCRDKECTECDPLPNPSLTARSSQALSPHPQPTHLPYVSEMLE | |
| CD27 extracellular | ARTAGHMQTLADFRQLPARTLSTHWPPQRSLCSSDFIRILVIFSGMFLVFT | |
| domain, CD27 | LAGALFL [symbol] [symbol] | |
| transmembrane domain, | [symbol] RVKFSRSADAPAYQQGQNQLYNELNLGRREEYDVLDKRRGRDPEMG | |
| [symbol] | GKPRRKNPQEGLYNELQKDKMAEAYSEIGMKGERRRGKGHDGLYQGLSTAT | |
| [symbol] CD3z | KDTYDALHMQALPPR | |
| signaling domain | | |
| CAT-70-005 | MARPHPWWLCVLGTLVGLSATPAPKSCPERHYWAQGKLCCQMCEPGTFLVK | 645 |
| CD27 signal peptide, | DCDQHRKAAQCDPCIPGVSFSPDHHTRPHCESCRHCNSGLLVRNCTITANA | |
| CD27 extracellular | ECACRNGWQCRDKECTECDPLPNPSLTARSSQALSPHPQPTHLPYVSEMLE | |
| domain, CD28 | ARTAGHMQTLADFRQLPARTLSTHWPPQRSLCSSDFIRFWVLVVVGGVLAC | |
| transmembrane domain, | YSLLVTVAFIIFWV [symbol] [symbol] | |
| [symbol] | [symbol] RVKFSRSADAPAYQQGQNQLYNELNLGRREEYDVLDKRRGRDPEMGG | |
| [symbol] CD3z | KPRRKNPQEGLYNELQKDKMAEAYSEIGMKGERRRGKGHDGLYQGLSTATK | |
| signaling domain | DTYDALHMQALPPR | |
| CAT-70-006 | MARPHPWWLCVLGTLVGLSATPAPKSCPERHYWAQGKLCCQMCEPGTFLVK | 647 |
| CD27 signal peptide, | DCDQHRKAAQCDPCIPGVSFSPDHHTRPHCESCRHCNSGLLVRNCTITANA | |
| CD27 extracellular | ECACRNGWQCRDKECTECDPLPNPSLTARSSQALSPHPQPTHLPYVSEMLE | |
| domain, NKG2D | ARTAGHMQTLADFRQLPARTLSTHWPPQRSLCSSDFIRPFFFCCFIAVAMG | |
| transmembrane domain, | IRFIIMVAIWSAVFLNS [symbol] RVKFSRSADA | |
| [symbol] | PAYQQGQNQLYNELNLGRREEYDVLDKRRGRDPEMGGKPRRKNPQEGLYNE | |
| [symbol] CD3z | LQKDKMAEAYSEIGMKGERRRGKGHDGLYQGLSTATKDTYDALHMQALPPR | |
| signaling domain | | |
| CAT-70-007 | MARPHPWWLCVLGTLVGLSATPAPKSCPERHYWAQGKLCCQMCEPGTFLVK | 700 |
| CD27 signal peptide, | DCDQHRKAAQCDPCIPGVSFSPDHHTRPHCESCRHCNSGLLVRNCTITANA | |
| CD27 extracellular | ECACRNGWQCRDKECTECDPLPNPSLTARSSQALSPHPQPTHLPYVSEMLE | |
| domain, NKG2D | ARTAGHMQTLADFRQLPARTLSTHWPPQRSLCSSDFIRPFFFCCFIAVAMG | |
| transmembrane domain, | IRFIIMVAIWSAVFLNS [symbol] [symbol] | |
| [symbol] | [symbol] RVKFSRSADAPAYQQGQNQLYNELNLGRREEYD | |
| [symbol] CD3z | VLDKRRGRDPEMGGKPRRKNPQEGLYNELQKDKMAEAYSEIGMKGERRRGK | |
| signaling domain | GHDGLYQGLSTATKDTYDALHMQALPPR | |
| CAT-CD70-119 | MARPHPWWLCVLGTLVGLSATPAPKSCPERHYWAQGKLCCQMCEPGTFLVK | 2561 |
| CD27 signal peptide, | DCDQHRKAAQCDPCIPGVSFSPDHHTRPHCESCRHCNSGLLVRNCTITANA | |
| CD27 extracellular | ECACRNGWQCRDKECTECDPLPNPSLTARSSQALSPHPQPTHLPYVSEMLE | |
| domain, CD27 | ARTAGHMQTLADFRQLPARTLSTHWPPQRSLCSSDFIRILVIFSGMFLVFT | |
| transmembrane domain, | LAGALFL [symbol] [symbol] R | |
| [symbol] | VKFSRSADAPAYQQGQNQLYNELNLGRREEYDVLDKRRGRDPEMGGKPRRK | |
| [symbol] CD3z | NPQEGLYNELQKDKMAEAYSEIGMKGERRRGKGHDGLYQGLSTATKDTYDA | |
| signaling domain | LHMQALPPR | |
| CAT-CD70-122 | MARPHPWWLCVLGTLVGLSATPAPKSCPERHYWAQGKLCCQMCEPGTFLVK | 2562 |
| CD27 signal peptide, | DCDQHRKAAQCDPCIPGVSFSPDHHTRPHCESCRHCNSGLLVRNCTITANA | |
| CD27 extracellular | ECACRNGWQCRDKECTECDPLPNPSLTARSSQALSPHPQPTHLPYVSEMLE | |
| domain, CD8α hinge, | ARTAGHMQTLADFRQLPARTLSTHWPPQRSLCSSDFIRFVPVFLPAKPTTT | |
| CD8α transmembrane | PAPRPPTPAPTIASQPLSLRPEACRPAAGGAVHTRGLDFACDIYIWAPLAG | |
| domain, [symbol] | TCGVLLLSLVITLYCNHRN [symbol] [symbol] | |
| [symbol] | [symbol] RVKFSRSADAPAYQQGQNQLYNELNLGRREEYDVLDKRRG | |
| CD3z signaling domain | RDPEMGGKPRRKNPQEGLYNELQKDKMAEAYSEIGMKGERRRGKGHDGLYQ | |
| | GLSTATKDTYDALHMQALPPR | |
| CAT-CD70-124 | MARPHPWWLCVLGTLVGLSATPAPKSCPERHYWAQGKLCCQMCEPGTFLVK | 2563 |
| CD27 signal peptide, | DCDQHRKAAQCDPCIPGVSFSPDHHTRPHCESCRHCNSGLLVRNCTITANA | |
| CD27 extracellular | ECACRNGWQCRDKECTECDPLPNPSLTARSSQALSPHPQPTHLPYVSEMLE | |
| domain, CD27 | ARTAGHMQTLADFRQLPARTLSTHWPPQRSLCSSDFIRILVIFSGMFLVFT | |
| transmembrane domain, | LAGALFL [symbol] [symbol] RVK | |
| [symbol] | FSRSADAPAYQQGQNQLYNELNLGRREEYDVLDKRRGRDPEMGGKPRRKNP | |
| [symbol] CD3z | QEGLYNELQKDKMAEAYSEIGMKGERRRGKGHDGLYQGLSTATKDTYDALH | |
| signaling domain | MQALPPR | |
| CAT-CD70-125 | MARPHPWWLCVLGTLVGLSATPAPKSCPERHYWAQGKLCCQMCEPGTFLVK | 2564 |
| CD27 signal peptide, | DCDQHRKAAQCDPCIPGVSFSPDHHTRPHCESCRHCNSGLLVRNCTITANA | |
| CD27 extracellular | ECACRNGWQCRDKECTECDPLPNPSLTARSSQALSPHPQPTHLPYVSEMLE | |
| domain, CD8α hinge, | ARTAGHMQTLADFRQLPARTLSTHWPPQRSLCSSDFIRFVPVFLPAKPTTT | |
| CD8α tmnsmembrane | PAPRPPTPAPTIASQPLSLRPEACRPAAGGAVHTRGLDFACDIYIWAPLAG | |
| domain, [symbol] | TCGVLLLSLVITLYCNHRN [symbol] [symbol] | |
| [symbol] | [symbol] RVKFSRSADAPAYQQGQNQLYNELNLGRREEYDVLDKRRGRD | |
| CD3z signaling domain | PEMGGKPRRKNPQEGLYNELQKDKMAEAYSEIGMKGERRRGKGHDGLYQGL | |
| | STATKDTYDALHMQALPPR | |
| CAT-CD70-127 | MALPVTALLLPLALLLHAARPQVQLVQSGAEVKKPGASVKVSCKASGYTFT | 2565 |
| (Construct #2) | NYGMNWVRQAPGQGLKWMGWINTYTGEPTYADAFKGRVTMTRDTSISTAYM | |
| CD8α signal peptide, | ELSRLRSDDTAVYYCARDYGDYGMDYWGQGTTVTVSSGGGGSGGGGSGGGG | |
| CD70 scFv (1F6), | SGDIVMTQSPDSLAVSLGERATINCRASKSVSTSGYSFMHWYQQKPGQPPK | |
| CD8α hinge, CD8α | LLIYLASNLESGVPDRFSGSGSGTDFTLTISSLQAEDVAVYYCQHSREVPW | |
| transmembrane domain, | TFGQGTKVEIKFVPVFLPAKPTTTPAPRPPTPAPTIASQPLSLRPEACRPA | |
| [symbol] | AGGAVHTRGLDFACDIYIWAPLAGTCGVLLLSLVITLYCNHRN [symbol] | |
| [symbol] CD3z | [symbol] [symbol] RVKFSRSADAPAYQQG | |
| signaling domain | QNQLYNELNLGRREEYDVLDKRRGRDPEMGGKPRRKNPQEGLYNELQKDKM | |
| | AEAYSEIGMKGERRRGKGHDGLYQGLSTATKDTYDALHMQALPPR | |
| CAT-CD70-130 | MALPVTALLLPLALLLHAARPQVQLVQSGAEVKKPGASVKVSCKASGYTFT | 2566 |
| CD8α signal peptide, | NYGMNWVRQAPGQGLKWMGWINTYTGEPTYADAFKGRVTMTRDTSISTAYM | |
| CD70 scFv (1F6), | ELSRLRSDDTAVYYCARDYGDYGMDYWGQGTTVTVSSGGGGSGGGGSGGGG | |
| IgG1 hinge, CD28 | SGDIVMTQSPDSLAVSLGERATINCRASKSVSTSGYSFMHWYQQKPGQPPK | |
| transmembrane domain, | LLIYLASNLESGVPDRFSGSGSGTDFTLTISSLQAEDVAVYYCQHSREVPW | |
| [symbol] | TFGQGTKVEIKEPKSCDKTHTCPPCPAPELLGGPSVFLFPPKPKDTLMISR | |
| [symbol] CD3z | TPEVTCVVVDVSHEDPEVKFNWYVDGVEVHNAKTKPREEQYNSTYRVVSVL | |
| signaling domain | TVLHQDWLNGKEYKCKVSNKALPAPIEKTISKAKGQPREPQVYTLPPSRDE | |
| | LTKNQVSLTCLVKGFYPSDIAVEWESNGQPENNYKTTPPVLDSDGSFFLYS | |
| | KLTVDKSRWQQGNVFSCSVMHEALHNHYTQKSLSLSPGKFWVLVVVGGVLA | |
| | CYSLLVTVAFIIFWV [symbol] [symbol] | |
| | [symbol] RVKFSRSADAPAYQQGQNQLYNELNLGRREEYDVLDKRRGRDPEMG | |
| | GKPRRKNPQEGLYNELQKDKMAEAYSEIGMKGERRRGKGHDGLYQGLSTAT | |
| | KDTYDALHMQALPPR | |
| CAT-CD70-133 | MALPVTALLLPLALLLHAARPQVQLVQSGAEVKKPGASVKVSCKASGYTFT | 2567 |
| CD8α signal peptide, | NYGMNWVRQAPGQGLKWMGWINTYTGEPTYADAFKGRVTMTRDTSISTAYM | |
| CD70 scFv (1F6), | ELSRLRSDDTAVYYCARDYGDYGMDYWGQGTTVTVSSGGGGSGGGGSGGGG | |
| CD28 hinge, CD28 | SGDIVMTQSPDSLAVSLGERATINCRASKSVSTSGYSFMHWYQQKPGQPPK | |
| transmembrane domain, | LLIYLASNLESGVPDRFSGSGSGTDFTLTISSLQAEDVAVYYCQHSREVPW | |
| [symbol] | TFGQGTKVEIKIEVMYPPPYLDNEKSNGTIIHVKGKHLCPSPLFPGPSKPF | |
| [symbol] CD3z | WVLVVVGGVLACYSLLVTVAFIIFWV [symbol] [symbol] | |
| signaling domain | [symbol] RVKFSRSADAPAYQQGQNQLYNELNLGRREEYDVL | |
| | DKRRGRDPEMGGKPRRKNPQEGLYNELQKDKMAEAYSEIGMKGERRRGKGH | |
| | DGLYQGLSTATKDTYDALHMQALPPR | |
| CAT-CD70-135 | MALPVTALLLPLALLLHAARPQVQLVQSGAEVKKPGASVKVSCKASGYTFT | 2568 |
| CD8α signal peptide, | NYGMNWVRQAPGQGLKWMGWINTYTGEPTYADAFKGRVTMTRDTSISTAYM | |
| CD70 scFv (1F6), | ELSRLRSDDTAVYYCARDYGDYGMDYWGQGTTVTVSSGGGGSGGGGSGGGG | |
| CD8α hinge, CD8α | SGDIVMTQSPDSLAVSLGERATINCRASKSVSTSGYSFMHWYQQKPGQPPK | |
| transmembrane domain, | LLIYLASNLESGVPDRFSGSGSGTDFTLTISSLQAEDVAVYYCQHSREVPW | |
| [symbol] | TFGQGTKVEIKFVPVFLPAKPTTTPAPRPPTPAPTIASQPLSLRPEACRPA | |
| [symbol] CD3z | AGGAVHTRGLDFACDIYIWAPLAGTCGVLLLSLVITLYCNHRN [symbol] | |
| signaling domain | [symbol] [symbol] RVKFSRSADAPAYQQGQN | |
| | QLYNELNLGRREEYDVLDKRRGRDPEMGGKPRRKNPQEGLYNELQKDKMAE | |
| | AYSEIGMKGERRRGKGHDGLYQGLSTATKDTYDALHMQALPPR | |
| CAT-CD70-136 | MARPHPWWLCVLGTLVGLSATPAPKSCPERHYWAQGKLCCQMCEPGTFLVK | 2569 |
| CD27 signal peptide, | DCDQHRKAAQCDPCIPGVSFSPDHHTRPHCESCRHCNSGLLVRNCTITANA | |
| CD27 extracellular | ECACRNGWQCRDKECTECDPLPNPSLTARSSQALSPHPQPTHLPYVSEMLE | |
| domain, CD27 | ARTAGHMQTLADFRQLPARTLSTHWPPQRSLCSSDFIRILVIFSGMFLVFT | |
| transmembrane domain, | LAGALFL [symbol] [symbol] | |
| [symbol] | [symbol] YFLGRLVPRGRGAAEAATRKQRITETESPYQELQGQRSDVYSDLNT | |
| [symbol] DAP12 | QRPYYK | |
| signaling domain | | |
| CAT-CD70-137 | MARPHPWWLCVLGTLVGLSATPAPKSCPERHYWAQGKLCCQMCEPGTFLVK | 2570 |
| CD27 signal peptide, | DCDQHRKAAQCDPCIPGVSFSPDHHTRPHCESCRHCNSGLLVRNCTITANA | |
| CD27 extracellular | ECACRNGWQCRDKECTECDPLPNPSLTARSSQALSPHPQPTHLPYVSEMLE | |
| domain, CD27 | ARTAGHMQTLADFRQLPARTLSTHWPPQRSLCSSDFIRILVIFSGMFLVFT | |
| transmembrane domain, | LAGALFL [symbol] [symbol] | |
| [symbol] | [symbol] RLKIQVRKAAITSYEKSDGVYTGLSTRNQETYETLKHEKPPQ | |
| [symbol] FCER1G | | |
| signaling domain | | |
| CAT-CD70-140 | MARPHPWWLCVLGTLVGLSATPAPKSCPERHYWAQGKLCCQMCEPGTFLVK | 2571 |
| CD27 signal peptide, | DCDQHRKAAQCDPCIPGVSFSPDHHTRPHCESCRHCNSGLLVRNCTITANA | |
| CD27 extracellular | ECACRNGWQCRDKECTECDPLPNPSLTARSSQALSPHPQPTHLPYVSEMLE | |
| domain, DAP10 | ARTAGHMQTLADFRQLPARTLSTHWPPQRSLCSSDFIRLLAGLVAADAVAS | |
| transmembrane domain, | LLIVGAVF [symbol] [symbol] RVKFSRSADAPAYQQGQNQ | |
| [symbol] | LYNELNLGRREEYDVLDKRRGRDPEMGGKPRRKNPQEGLYNELQKDKMAEA | |
| [symbol] CD3z | YSEIGMKGERRRGKGHDGLYQGLSTATKDTYDALHMQALPPR | |
| signaling domain | | |
| CAT-CD70-141 | MARPHPWWLCVLGTLVGLSATPAPKSCPERHYWAQGKLCCQMCEPGTFLVK | 2572 |
| CD27 signal peptide, | DCDQHRKAAQCDPCIPGVSFSPDHHTRPHCESCRHCNSGLLVRNCTITANA | |
| CD27 extracellular | ECACRNGWQCRDKECTECDPLPNPSLTARSSQALSPHPQPTHLPYVSEMLE | |
| domain, DAP12 | ARTAGHMQTLADFRQLPARTLSTHWPPQRSLCSSDFIRGVLAGIVMGDLVL | |
| transmembrane domain, | TVLIALAV [symbol] [symbol] | |
| [symbol] | [symbol] RVKFSRSADAPAYQQGQNQLYNELNLGRREEYDVLDKRRGRD | |
| [symbol] CD3z | PEMGGKPRRKNPQEGLYNELQKDKMAEAYSEIGMKGERRRGKGHDGLYQGL | |
| signaling domain | STATKDTYDALHMQALPPR | |
| CAT-CD70-142 | MARPHPWWLCVLGTLVGLSATPAPKSCPERHYWAQGKLCCQMCEPGTFLVK | 2573 |
| CD27 signal peptide, | DCDQHRKAAQCDPCIPGVSFSPDHHTRPHCESCRHCNSGLLVRNCTITANA | |
| CD27 extracellular | ECACRNGWQCRDKECTECDPLPNPSLTARSSQALSPHPQPTHLPYVSEMLE | |
| domain, DAP12 | ARTAGHMQTLADFRQLPARTLSTHWPPQRSLCSSDFIRGVLAGIVMGDLVL | |
| transmembrane domain, | TVLIALAV [symbol] [symbol] | |
| [symbol] | [symbol] | |
| [symbol] | | |
| CAT-CD70-143 | MALPVTALLLPLALLLHAARPQVQLVQSGAEVKKPGASVKVSCKASGYTFT | 2574 |
| CD8α signal peptide, | NYGMNWVRQAPGQGLKWMGWINTYTGEPTYADAFKGRVTMTRDTSISTAYM | |
| CD70 scFv (1F6), | ELSRLRSDDTAVYYCARDYGDYGMDYWGQGTTVTVSSGGGGSGGGGSGGGG | |
| IgG1 hinge, CD28 | SGDIVMTQSPDSLAVSLGERATINCRASKSVSTSGYSFMHWYQQKPGQPPK | |
| transmembrane domain, | LLIYLASNLESGVPDRFSGSGSGTDFTLTISSLQAEDVAVYYCQHSREVPW | |
| [symbol] | TFGQGTKVEIKEPKSCDKTHTCPPCPAPELLGGPSVFLFPPKPKDTLMISR | |
| [symbol] | TPEVTCVVVDVSHEDPEVKFNWYVDGVEVHNAKTKPREEQYNSTYRVVSVL | |
| | TVLHQDWLNGKEYKCKVSNKALPAPIEKTISKAKGQPREPQVYTLPPSRDE | |
| | LTKNQVSLTCLVKGFYPSDIAVEWESNGQPENNYKTTPPVLDSDGSFFLYS | |
| | KLTVDKSRWQQGNVFSCSVMHEALHNHYTQKSLSLSPGKFWVLVVVGGVLA | |
| | CYSLLVTVAFIIFWV [symbol] [symbol] | |
| | AAYRS [symbol] | |
| CAT-CD70-144 | MALPVTALLLPLALLLHAARPQVQLVQSGAEVKKPGASVKVSCKASGYTFT | 2575 |
| CD8α signal peptide, | NYGMNWVRQAPGQGLKWMGWINTYTGEPTYADAFKGRVTMTRDTSISTAYM | |
| CD70 scFv (1F6), | ELSRLRSDDTAVYYCARDYGDYGMDYWGQGTTVTVSSGGGGSGGGGSGGGG | |
| CD8α hinge, CD8α | SGDIVMTQSPDSLAVSLGERATINCRASKSVSTSGYSFMHWYQQKPGQPPK | |
| transmembrane domain, | LLIYLASNLESGVPDRFSGSGSGTDFTLTISSLQAEDVAVYYCQHSREVPW | |
| [symbol] | TFGQGTKVEIKFVPVFLPAKPTTTPAPRPPTPAPTIASQPLSLRPEACRPA | |
| [symbol] | AGGAVHTRGLDFACDIYIWAPLAGTCGVLLLSLVITLYCNHRNRKRGRECKL | |
| | LYIFKQPFMRPVQTTQEEDGCSCRFPEEEEGGCEL | |
| CAT-CD70-145 | MALPVTALLLPLALLLHAARPQVQLVQSGAEVKKPGASVKVSCKASGYTFT | 2576 |
| CD8α signal peptide, | NYGMNWVRQAPGQGLKWMGWINTYTGEPTYADAFKGRVTMTRDTSISTAYM | |
| CD70 scFv (1F6), | ELSRLRSDDTAVYYCARDYGDYGMDYWGQGTTVTVSSGGGGSGGGGSGGGG | |
| CD8α hinge, CD8α | SGDIVMTQSPDSLAVSLGERATINCRASKSVSTSGYSFMHWYQQKPGQPPK | |
| transmembrane domain, | LLIYLASNLESGVPDRFSGSGSGTDFTLTISSLQAEDVAVYYCQHSREVPW | |
| CD3z signaling domain | TFGQGTKVEIKFVPVFLPAKPTTTPAPRPPTPAPTIASQPLSLRPEACRPA | |
| | AGGAVHTRGLDFACDIYIWAPLAGTCGVLLLSLVITLYCNHRNRVKFSRSA | |
| | DAPAYQQGQNQLYNELNLGRREEYDVLDKRRGRDPEMGGKPRRKNPQEGLY | |
| | NELQKDKMAEAYSEIGMKGERRRGKGHDGLYQGLSTATKDTYDALHMQALP | |
| | PR | |
| CAT-CD70-146 | MALPVTALLLPLALLLHAARPQVQLVQSGAEVKKPGASVKVSCKASGYTFT | 2577 |
| CD8α signal peptide, | NYGMNWVRQAPGQGLKWMGWINTYTGEPTYADAFKGRVTMTRDTSISTAYM | |
| CD70 scFv (1F6), | ELSRLRSDDTAVYYCARDYGDYGMDYWGQGTTVTVSSGGGGSGGGGSGGGG | |
| CD8α hinge, CD8α | SGDIVMTQSPDSLAVSLGERATINCRASKSVSTSGYSFMHWYQQKPGQPPK | |
| transmembrane domain, | LLIYLASNLESGVPDRFSGSGSGTDFTLTISSLQAEDVAVYYCQHSREVPW | |
| [symbol] | TFGQGTKVEIKFVPVFLPAKPTTTPAPRPPTPAPTIASQPLSLRPEACRPA | |
| [symbol] , 4-1BB | AGGAVHTRGLDFACDIYIWAPLAGTCGVLLLSLVITLYCNHRN [symbol] | |
| signaling domain | [symbol] [symbol] RKRGRKKLLYIFKQPF | |
| | MRPVQTTQEEDGCSCRFPEEEEGGCEL | |
| CAT-CD70-147 | MALPVTALLLPLALLLHAARPQVQLVQSGAEVKKPGASVKVSCKASGYTFT | 2578 |
| CD8α signal peptide, | NYGMNWVRQAPGQGLKWMGWINTYTGEPTYADAFKGRVTMTRDTSISTAYM | |
| CD70 scFv (1F6), | ELSRLRSDDTAVYYCARDYGDYGMDYWGQGTTVTVSSGGGGSGGGGSGGGG | |
| CD8α hinge, CD8α | SGDIVMTQSPDSLAVSLGERATINCRASKSVSTSGYSFMHWYQQKPGQPPK | |
| transmembrane domain, | LLIYLASNLESGVPDRFSGSGSGTDFTLTISSLQAEDVAVYYCQHSREVPW | |
| [symbol] | TFGQGTKVEIKFVPVFLPAKPTTTPAPRPPTPAPTIASQPLSLRPEACRPA | |
| CD3z signaling domain | AGGAVHTRGLDFACDIYIWAPLAGTCGVLLLSLVITLYCNHRN [symbol] | |
| | [symbol] [symbol] [symbol] | |
| | [symbol] [symbol] [symbol] | |
| | [symbol] RVKFSRSADAPAYQQGQNQLYNELNLGRREEYDVLDKRRGR | |
| | DPEMGGKPRRKNPQEGLYNELQKDKMAEAYSEIGMKGERRRGKGHDGLYQG | |
| | LSTATKDTYDALHMQALPPR | |
| CAT-CD70-148 | MALPVTALLLPLALLLHAARPQVQLVQSGAEVKKPGASVKVSCKASGYTFT | 2579 |
| CD8α signal peptide, | NYGMNWVRQAPGQGLKWMGWINTYTGEPTYADAFKGRVTMTRDTSISTAYM | |
| CD70 scFv (1F6), | ELSRLRSDDTAVYYCARDYGDYGMDYWGQGTTVTVSSGGGGSGGGGSGGGG | |
| CD8α hinge, CD8α | SGDIVMTQSPDSLAVSLGERATINCRASKSVSTSGYSFMHWYQQKPGQPPK | |
| transmembrane domain, | LLIYLASNLESGVPDRFSGSGSGTDFTLTISSLQAEDVAVYYCQHSREVPW | |
| [symbol] | TFGQGTKVEIKFVPVFLPAKPTTTPAPRPPTPAPTIASQPLSLRPEACRPA | |
| [symbol] CD3z | AGGAVHTRGLDFACDIYIWAPLAGTCGVLLLSLVITLYCNHRN [symbol] | |
| signaling domain | [symbol] RVKFSRSADAPAYQQGQNQLYNELNLGRREEYDVL | |
| | DKRRGRDPEMGGKPRRKNPQEGLYNELQKDKMAEAYSEIGMKGERRRGKGH | |
| | DGLYQGLSTATKDTYDALHMQALPPR | |
| CAT-CD70-149 | MALPVTALLLPLALLLHAARPQVQLVQSGAEVKKPGASVKVSCKASGYTFT | 2580 |
| CD8α signal peptide, | NYGMNWVRQAPGQGLKWMGWINTYTGEPTYADAFKGRVTMTRDTSISTAYM | |
| CD70 scFv (1F6), | ELSRLRSDDTAVYYCARDYGDYGMDYWGQGTTVTVSSGGGGSGGGGSGGGG | |
| CD8α hinge, CD8α | SGDIVMTQSPDSLAVSLGERATINCRASKSVSTSGYSFMHWYQQKPGQPPK | |
| transmembrane domain, | LLIYLASNLESGVPDRFSGSGSGTDFTLTISSLQAEDVAVYYCQHSREVPW | |
| [symbol] | TFGQGTKVEIKFVPVFLPAKPTTTPAPRPPTPAPTIASQPLSLRPEACRPA | |
| [symbol] CD3z | AGGAVHTRGLDFACDIYIWAPLAGTCGVLLLSLVITLYCNHRN [symbol] | |
| signaling domain | [symbol] [symbol] [symbol] RVKFSRS | |
| | ADAPAYQQGQNQLYNELNLGRREEYDVLDKRRGRDPEMGGKPRRKNPQEGL | |
| | YNELQKDKMAEAYSEIGMKGERRRGKGHDGLYQGLSTATKDTYDALHMQAL | |
| | PPR | |
| CAT-CD70-150 | MALPVTALLLPLALLLHAARPQVQLVQSGAEVKKPGASVKVSCKASGYTFT | 2581 |
| CD8α signal peptide, | NYGMNWVRQAPGQGLKWMGWINTYTGEPTYADAFKGRVTMTRDTSISTAYM | |
| CD70 scFv (1F6), | ELSRLRSDDTAVYYCARDYGDYGMDYWGQGTTVTVSSGGGGSGGGGSGGGG | |
| CD8α hinge, CD8α | SGDIVMTQSPDSLAVSLGERATINCRASKSVSTSGYSFMHWYQQKPGQPPK | |
| transmembrane domain, | LLIYLASNLESGVPDRFSGSGSGTDFTLTISSLQAEDVAVYYCQHSREVPW | |
| [symbol] | TFGQGTKVEIKFVPVFLPAKPTTTPAPRPPTPAPTIASQPLSLRPEACRPA | |
| [symbol] CD3z | AGGAVHTRGLDFACDIYIWAPLAGTCGVLLLSLVITLYCNHRN [symbol] | |
| signaling domain | [symbol] [symbol] RVKFSRSADAPAYQQGQ | |
| | NQLYNELNLGRREEYDVLDKRRGRDPEMGGKPRRKNPQEGLYNELQKDKMA | |
| | EAYSEIGMKGERRRGKGHDGLYQGLSTATKDTYDALHMQALPPR | |
| CAT-CD70-153 | MALPVTALLLPLALLLHAARPQVQLVQSGAEVKKPGASVKVSCKASGYTFT | 2582 |
| CD8α signal peptide, | NYGMNWVRQAPGQGLKWMGWINTYTGEPTYADAFKGRVTMTRDTSISTAYM | |
| CD70 scFv (1F6), | ELSRLRSDDTAVYYCARDYGDYGMDYWGQGTTVTVSSGGGGSGGGGSGGGG | |
| CD8α hinge, NKG2D | SGDIVMTQSPDSLAVSLGERATINCRASKSVSTSGYSFMHWYQQKPGQPPK | |
| transmembrane domain, | LLIYLASNLESGVPDRFSGSGSGTDFTLTISSLQAEDVAVYYCQHSREVPW | |
| [symbol] | TFGQGTKVEIKFVPVFLPAKPTTTPAPRPPTPAPTIASQPLSLRPEACRPA | |
| CD3z signaling domain | AGGAVHTRGLDFACDPFFFCCFIAVAMGIRFIIMVAIWSAVFLNS [symbol] | |
| | [symbol] [symbol] [symbol] | |
| | [symbol] [symbol] [symbol] | |
| | [symbol] RVKFSRSADAPAYQQGQNQLYNELNLGRREEYDVLDKRR | |
| | GRDPEMGGKPRRKNPQEGLYNELQKDKMAEAYSEIGMKGERRRGKGHDGLY | |
| | QGLSTATKDTYDALHMQALPPR | |
| CAT-CD70-154 | MALPVTALLLPLALLLHAARPQVQLVQSGAEVKKPGASVKVSCKASGYTFT | 2583 |
| CD8α signal peptide, | NYGMNWVRQAPGQGLKWMGWINTYTGEPTYADAFKGRVTMTRDTSISTAYM | |
| CD70 scFv (1F6), | ELSRLRSDDTAVYYCARDYGDYGMDYWGQGTTVTVSSGGGGSGGGGSGGGG | |
| CD8α hinge, DAP10 | SGDIVMTQSPDSLAVSLGERATINCRASKSVSTSGYSFMHWYQQKPGQPPK | |
| transmembrane domain, | LLIYLASNLESGVPDRFSGSGSGTDFTLTISSLQAEDVAVYYCQHSREVPW | |
| [symbol] | TFGQGTKVEIKFVPVFLPAKPTTTPAPRPPTPAPTIASQPLSLRPEACRPA | |
| [symbol] CD3z | AGGAVHTRGLDFACDLLAGLVAADAVASLLIVGAVF [symbol] | |
| signaling domain | [symbol] RVKFSRSADAPAYQQGQNQLYNELNLGRREEYDVLDKRRGRD | |
| | PEMGGKPRRKNPQEGLYNELQKDKMAEAYSEIGMKGERRRGKGHDGLYQGL | |
| | STATKDTYDALHMQALPPR | |
| CAT-CD70-155 | MALPVTALLLPLALLLHAARPQVQLVQSGAEVKKPGASVKVSCKASGYTFT | 2584 |
| CD8α signal peptide, | NYGMNWVRQAPGQGLKWMGWINTYTGEPTYADAFKGRVTMTRDTSISTAYM | |
| CD70 scFv (1F6), | ELSRLRSDDTAVYYCARDYGDYGMDYWGQGTTVTVSSGGGGSGGGGSGGGG | |
| CD8α hinge, DAP12 | SGDIVMTQSPDSLAVSLGERATINCRASKSVSTSGYSFMHWYQQKPGQPPK | |
| transmembrane domain, | LLIYLASNLESGVPDRFSGSGSGTDFTLTISSLQAEDVAVYYCQHSREVPW | |
| [symbol] | TFGQGTKVEIKFVPVFLPAKPTTTPAPRPPTPAPTIASQPLSLRPEACRPA | |
| [symbol] CD3z | AGGAVHTRGLDFACDGVLAGIVMGDLVLTVLIALAV [symbol] | |
| signaling domain | [symbol] [symbol] RVKFSRSADAPAYQ | |
| | QGQNQLYNELNLGRREEYDVLDKRRGRDPEMGGKPRRKNPQEGLYNELQKD | |
| | KMAEAYSEIGMKGERRRGKGHDGLYQGLSTATKDTYDALHMQALPPR | |
| CAT-CD70-156 | MALPVTALLLPLALLLHAARPQVQLVQSGAEVKKPGASVKVSCKASGYTFT | 2585 |
| CD8α signal peptide, | NYGMNWVRQAPGQGLKWMGWINTYTGEPTYADAFKGRVTMTRDTSISTAYM | |
| CD70 scFv (1F6), | ELSRLRSDDTAVYYCARDYGDYGMDYWGQGTTVTVSSGGGGSGGGGSGGGG | |
| CD8α hinge, DAP12 | SGDIVMTQSPDSLAVSLGERATINCRASKSVSTSGYSFMHWYQQKPGQPPK | |
| transmembrane domain, | LLIYLASNLESGVPDRFSGSGSGTDFTLTISSLQAEDVAVYYCQHSREVPW | |
| [symbol] | TFGQGTKVEIKFVPVFLPAKPTTTPAPRPPTPAPTIASQPLSLRPEACRPA | |
| [symbol] | AGGAVHTRGLDFACDGVLAGIVMGDLVLTVLIALAV [symbol] | |
| | [symbol] [symbol] | |
| CAT-CD70-157 | MALPVTALLLPLALLLHAARPQVQLVQSGAEVKKPGASVKVSCKASGYTFT | 2586 |
| CD8α signal peptide, | NYGMNWVRQAPGQGLKWMGWINTYTGEPTYADAFKGRVTMTRDTSISTAYM | |
| CD70 scFv (1F6), | ELSRLRSDDTAVYYCARDYGDYGMDYWGQGTTVTVSSGGGGSGGGGSGGGG | |
| CD8α hinge, CD28 | SGDIVMTQSPDSLAVSLGERATINCRASKSVSTSGYSFMHWYQQKPGQPPK | |
| transmembrane domain, | LLIYLASNLESGVPDRFSGSGSGTDFTLTISSLQAEDVAVYYCQHSREVPW | |
| [symbol] | TFGQGTKVEIKFVPVFLPAKPTTTPAPRPPTPAPTIASQPLSLRPEACRPA | |
| [symbol] DAP12 | AGGAVHTRGLDFACDFWVLVVVGGVLACYSLLVTVAFIIFWV [symbol] | |
| signaling domain | [symbol] [symbol] YFLGRLVPRGRGAAEAATR | |
| | KQRITETESPYQELQGQRSDVYSDLNTQRPYYK | |
| CAT-CD70-158 | MALPVTALLLPLALLLHAARPQVQLVQSGAEVKKPGASVKVSCKASGYTFT | 2587 |
| CD8αsignal peptide, | NYGMNWVRQAPGQGLKWMGWINTYTGEPTYADAFKGRVTMTRDTSISTAYM | |
| CD70 scFv (1F6), | ELSRLRSDDTAVYYCARDYGDYGMDYWGQGTTVTVSSGGGGSGGGGSGGGG | |
| CD8α hinge, CD8α | SGDIVMTQSPDSLAVSLGERATINCRASKSVSTSGYSFMHWYQQKPGQPPK | |
| transmembrane domain, | LLIYLASNLESGVPDRFSGSGSGTDFTLTISSLQAEDVAVYYCQHSREVPW | |
| [symbol] | TFGQGTKVEIKFVPVFLPAKPTTTPAPRPPTPAPTIASQPLSLRPEACRPA | |
| [symbol] DAP12 | AGGAVHTRGLDFACDIYIWAPLAGTCGVLLLSLVITLYCNHRN [symbol] | |
| signaling domain | [symbol] [symbol] YFLGRLVPRGRGAAEA | |
| | ATRKQRITETESPYQELQGQRSDVYSDLNTQRPYYK | |
| CAT-CD70-159 | MALPVTALLLPLALLLHAARPQVQLVQSGAEVKKPGASVKVSCKASGYTFT | 2588 |
| CD8α signal peptide, | NYGMNWVRQAPGQGLKWMGWINTYTGEPTYADAFKGRVTMTRDTSISTAYM | |
| CD70 scFv (1F6), | ELSRLRSDDTAVYYCARDYGDYGMDYWGQGTTVTVSSGGGGSGGGGSGGGG | |
| CD8α hinge, CD8α | SGDIVMTQSPDSLAVSLGERATINCRASKSVSTSGYSFMHWYQQKPGQPPK | |
| transmembrane domain, | LLIYLASNLESGVPDRFSGSGSGTDFTLTISSLQAEDVAVYYCQHSREVPW | |
| [symbol] | TFGQGTKVEIKFVPVFLPAKPTTTPAPRPPTPAPTIASQPLSLRPEACRPA | |
| [symbol] DAP12 | AGGAVHTRGLDFACDIYIWAPLAGTCGVLLLSLVITLYCNHRN [symbol] | |
| signaling domain | [symbol] [symbol] YFLGRLVPRGRGAAEAA | |
| | TRKQRITETESPYQELQGQRSDVYSDLNTQRPYYK | |
| CAT-CD70-160 | MALPVTALLLPLALLLHAARPQVQLVQSGAEVKKPGASVKVSCKASGYTFT | 2589 |
| CD8α signal peptide, | NYGMNWVRQAPGQGLKWMGWINTYTGEPTYADAFKGRVTMTRDTSISTAYM | |
| CD70 scFv (1F6), | ELSRLRSDDTAVYYCARDYGDYGMDYWGQGTTVTVSSGGGGSGGGGSGGGG | |
| CD8α hinge, CD8α | SGDIVMTQSPDSLAVSLGERATINCRASKSVSTSGYSFMHWYQQKPGQPPK | |
| transmembrane domain, | LLIYLASNLESGVPDRFSGSGSGTDFTLTISSLQAEDVAVYYCQHSREVPW | |
| [symbol] | TFGQGTKVEIKFVPVFLPAKPTTTPAPRPPTPAPTIASQPLSLRPEACRPA | |
| [symbol] DAP12 | AGGAVHTRGLDFACDIYIWAPLAGTCGVLLLSLVITLYCNHRN [symbol] | |
| signaling domain | [symbol] YFLGRLVPRGRGAAEAATRKQRITETESPYQELQG | |
| | QRSDVYSDLNTQRPYYK | |
| CAT-CD70-161 | MALPVTALLLPLALLLHAARPQVQLVQSGAEVKKPGASVKVSCKASGYTFT | 2590 |
| CD8α signal peptide, | NYGMNWVRQAPGQGLKWMGWINTYTGEPTYADAFKGRVTMTRDTSISTAYM | |
| CD70 scFv (1F6), | ELSRLRSDDTAVYYCARDYGDYGMDYWGQGTTVTVSSGGGGSGGGGSGGGG | |
| CD8α hinge, CD28 | SGDIVMTQSPDSLAVSLGERATINCRASKSVSTSGYSFMHWYQQKPGQPPK | |
| transmembrane domain, | LLIYLASNLESGVPDRFSGSGSGTDFTLTISSLQAEDVAVYYCQHSREVPW | |
| [symbol] | TFGQGTKVEIKFVPVFLPAKPTTTPAPRPPTPAPTIASQPLSLRPEACRPA | |
| [symbol] FCER1G | AGGAVHTRGLDFACDFWVLVVVGGVLACYSLLVTVAFIIFWV [symbol] | |
| signaling domain | [symbol] [symbol] RLKIQVRKAAITSYEKSDG | |
| | VYTGLSTRNQETYETLKHEKPPQ | |
| CAT-CD70-162 | MALPVTALLLPLALLLHAARPQVQLVQSGAEVKKPGASVKVSCKASGYTFT | 2591 |
| CD8α signal peptide, | NYGMNWVRQAPGQGLKWMGWINTYTGEPTYADAFKGRVTMTRDTSISTAYM | |
| CD70 scFv (1F6), | ELSRLRSDDTAVYYCARDYGDYGMDYWGQGTTVTVSSGGGGSGGGGSGGGG | |
| CD8α hinge, CD8α | SGDIVMTQSPDSLAVSLGERATINCRASKSVSTSGYSFMHWYQQKPGQPPK | |
| transmembrane domain, | LLIYLASNLESGVPDRFSGSGSGTDFTLTISSLQAEDVAVYYCQHSREVPW | |
| [symbol] | TFGQGTKVEIKFVPVFLPAKPTTTPAPRPPTPAPTIASQPLSLRPEACRPA | |
| [symbol] FCER1G | AGGAVHTRGLDFACDIYIWAPLAGTCGVLLLSLVITLYCNHRN [symbol] | |
| signaling domain | [symbol] [symbol] RLKIQVRKAAITSYEK | |
| | SDGVYTGLSTRNQETYETLKHEKPPQ | |
| CAT-CD70-163 | MALPVTALLLPLALLLHAARPQVQLVQSGAEVKKPGASVKVSCKASGYTFT | 2592 |
| CD8α signal peptide, | NYGMNWVRQAPGQGLKWMGWINTYTGEPTYADAFKGRVTMTRDTSISTAYM | |
| CD70 scFv (1F6), | ELSRLRSDDTAVYYCARDYGDYGMDYWGQGTTVTVSSGGGGSGGGGSGGGG | |
| CD8α hinge, CD8α | SGDIVMTQSPDSLAVSLGERATINCRASKSVSTSGYSFMHWYQQKPGQPPK | |
| transmembrane domain, | LLIYLASNLESGVPDRFSGSGSGTDFTLTISSLQAEDVAVYYCQHSREVPW | |
| [symbol] | TFGQGTKVEIKFVPVFLPAKPTTTPAPRPPTPAPTIASQPLSLRPEACRPA | |
| [symbol] FCER1G | AGGAVHTRGLDFACDIYIWAPLAGTCGVLLLSLVITLYCNHRN [symbol] | |
| signaling domain | [symbol] [symbol] RLKIQVRKAAITSYEKS | |
| | DGVYTGLSTRNQETYETLKHEKPPQ | |
| CAT-CD70-164 | MALPVTALLLPLALLLHAARPQVQLVQSGAEVKKPGASVKVSCKASGYTFT | 2593 |
| CD8α signal peptide, | NYGMNWVRQAPGQGLKWMGWINTYTGEPTYADAFKGRVTMTRDTSISTAYM | |
| CD70 scFv (1F6), | ELSRLRSDDTAVYYCARDYGDYGMDYWGQGTTVTVSSGGGGSGGGGSGGGG | |
| CD8α hinge, CD8α | SGDIVMTQSPDSLAVSLGERATINCRASKSVSTSGYSFMHWYQQKPGQPPK | |
| transmembrane domain, | LLIYLASNLESGVPDRFSGSGSGTDFTLTISSLQAEDVAVYYCQHSREVPW | |
| [symbol] | TEGQGTKVEIKFVPVFLPAKPTTTPAPRPPTPAPTIASQPLSLRPEACRPA | |
| [symbol] , FCER1G | AGGAVHTRGLDFACDIYIWAPLAGTCGVLLLSLVITLYCNHRNLCARPRRS | |
| signaling domain | PAQEDGKVYINMPGRGRLKIQVRKAAITSYEKSDGVYTGLSTRNQETYETL | |
| | KHEKPPQ | |
| CAT-CD70-278 | MALPVTALLLPLALLLHAARPQVQLVQSGAEVKKPGASVKVSCKASGYTFT | 2737 |
| CD8α signal peptide, | NYGMNWVRQAPGQGLKWMGWINTYTGEPTYADAFKGRVTMTRDTSISTAYM | |
| CD70 scFv (1F6), | ELSRLRSDDTAVYYCARDYGDYGMDYWGQGTTVTVSSGGGGSGGGGSGGGG | |
| CD8α short hinge, | SGDIVMTQSPDSLAVSLGERATINCRASKSVSTSGYSFMHWYQQKPGQPPK | |
| CD8α transmembrane | LLIYLASNLESGVPDRFSGSGSGTDFTLTISSLQAEDVAVYYCQHSREVPW | |
| domain, [symbol] | TFGQGTKVEIKTTTPAPRPPTPAPTIASQPLSLRPEACRPAAGGAVHTRGL | |
| [symbol] | DFACDIYIWAPLAGTCGVLLLSLVITLYCNHRN [symbol] | |
| CD3z signaling domain | [symbol] [symbol] RVKFSRSADAPAYQQGQNQLYNELNL | |
| | GRREEYDVLDKRRGRDPEMGGKPRRKNPQEGLYNELQKDKMAEAYSEIGMK | |
| | GERRRGKGHDGLYQGLSTATKDTYDALHMQALPPR | |
| CAT-CD 70-291 | MALPVTALLLPLALLLHAARPQVQLVQSGAEVKKPGASVKVSCKASGYTFT | 2739 |
| CD8α signal peptide, | NYGMNWVRQAPGQGLKWMGWINTYTGEPTYADAFKGRVTMTRDTSISTAYM | |
| CD70 scFv (1F6), | ELSRLRSDDTAVYYCARDYGDYGMDYWGQGTTVTVSSGGGGSGGGGSGGGG | |
| IgG1 short hinge, CD8α | SGDIVMTQSPDSLAVSLGERATINCRASKSVSTSGYSFMHWYQQKPGQPPK | |
| transmembrane domain, | LLIYLASNLESGVPDRFSGSGSGTDFTLTISSLQAEDVAVYYCQHSREVPW | |
| [symbol] | TEGQGTKVEIKAEPKSPDKTHTCPPCPKDPIYIWAPLAGTCGVLLLSLVIT | |
| [symbol] CD3z | LYCNHRN [symbol] [symbol] R | |
| signaling domain | VKFSRSADAPAYQQGQNQLYNELNLGRREEYDVLDKRRGRDPEMGGKPRRK | |
| | NPQEGLYNELQKDKMAEAYSEIGMKGERRRGKGHDGLYQGLSTATKDTYDA | |
| | LHMQALPPR | |
| CAT-CD 70-281 | MALPVTALLLPLALLLHAARPQVQLVQSGAEVKKPGASVKVSCKASGYTFT | 2741 |
| CD8α signal peptide, | NYGMNWVRQAPGQGLKWMGWINTYTGEPTYADAFKGRVTMTRDTSISTAYM | |
| CD70 scFv (1F6), | ELSRLRSDDTAVYYCARDYGDYGMDYWGQGTTVTVSSGGGGSGGGGSGGGG | |
| IgG4 short hinge, CD8α | SGDIVMTQSPDSLAVSLGERATINCRASKSVSTSGYSFMHWYQQKPGQPPK | |
| transmembrane domain, | LLIYLASNLESGVPDRFSGSGSGTDFTLTISSLQAEDVAVYYCQHSREVPW | |
| [symbol] | TFGQGTKVEIKESKYGPPCPSCPIYIWAPLAGTCGVLLLSLVITLYCNHRN | |
| [symbol] CD3z | [symbol] [symbol] RVKFSRSA | |
| signaling domain | DAPAYQQGQNQLYNELNLGRREEYDVLDKRRGRDPEMGGKPRRKNPQEGLY | |
| | NELQKDKMAEAYSEIGMKGERRRGKGHDGLYQGLSTATKDTYDALHMQALP | |
| | PR | |
| CAT-CD70-280 | MALPVTALLLPLALLLHAARPQVQLVQSGAEVKKPGASVKVSCKASGYTFT | 2743 |
| CD8α signal peptide, | NYGMNWVRQAPGQGLKWMGWINTYTGEPTYADAFKGRVTMTRDTSISTAYM | |
| CD70 scFv (1F6), | ELSRLRSDDTAVYYCARDYGDYGMDYWGQGTTVTVSSGGGGSGGGGSGGGG | |
| IgG4 hinge-CH3, CD8α | SGDIVMTQSPDSLAVSLGERATINCRASKSVSTSGYSFMHWYQQKPGQPPK | |
| transmembrane domain, | LLIYLASNLESGVPDRFSGSGSGTDFTLTISSLQAEDVAVYYCQHSREVPW | |
| [symbol] | TEGQGTKVEIKESKYGPPCPSCPGQPREPQVYTLPPSQEEMTKNQVSLTCL | |
| [symbol] CD3z | VKGFYPSDIAVEWESNGQPENNYKTTPPVLDSDGSFFLYSRLTVDKSRWQE | |
| signaling domain | GNVFSCSVMHEALHNHYTQKSLSLSLGKIYIWAPLAGTCGVLLLSLVITLY | |
| | CNHRN [symbol] [symbol] RVK | |
| | FSRSADAPAYQQGQNQLYNELNLGRREEYDVLDKRRGRDPEMGGKPRRKNP | |
| | QEGLYNELQKDKMAEAYSEIGMKGERRRGKGHDGLYQGLSTATKDTYDALH | |
| | MQALPPR | |
| CAT-CD70-279 | MALPVTALLLPLALLLHAARPQVQLVQSGAEVKKPGASVKVSCKASGYTFT | 2745 |
| CD8α signal peptide, | NYGMNWVRQAPGQGLKWMGWINTYTGEPTYADAFKGRVTMTRDTSISTAYM | |
| CD70 scFv (1F6), | ELSRLRSDDTAVYYCARDYGDYGMDYWGQGTTVTVSSGGGGSGGGGSGGGG | |
| IgG4 hinge-CH2-CH3, | SGDIVMTQSPDSLAVSLGERATINCRASKSVSTSGYSFMHWYQQKPGQPPK | |
| CD8α transmembrane | LLIYLASNLESGVPDRFSGSGSGTDFTLTISSLQAEDVAVYYCQHSREVPW | |
| domain, [symbol] | TFGQGTKVEIKESKYGPPCPSCPAPEFLGGPSVFLFPPKPKDTLMISRTPE | |
| [symbol] | VTCVVVDVSQEDPEVQFNWYVDGVEVHNAKTKPREEQFNSTYRVVSVLTVL | |
| CD3z signaling domain | HQDWLNGKEYKCKVSNKGLPSSIEKTISKAKGQPREPQVYTLPPSQEEMTK | |
| | NQVSLTCLVKGFYPSDIAVEWESNGQPENNYKTTPPVLDSDGSFFLYSRLT | |
| | VDKSRWQEGNVFSCSVMHEALHNHYTQKSLSLSLGKIYIWAPLAGTCGVLL | |
| | LSLVITLYCNHRN [symbol] [symbol] | |
| | [symbol] RVKFSRSADAPAYQQGQNQLYNELNLGRREEYDVLDKRRGRDPEMG | |
| | GKPRRKNPQEGLYNELQKDKMAEAYSEIGMKGERRRGKGHDGLYQGLSTAT | |
| | KDTYDALHMQALPPR | |
| CAT-CD70-293 | MALPVTALLLPLALLLHAARPQVQLVQSGAEVKKPGASVKVSCKASGYTFT | 2747 |
| CD8α signal peptide, | NYGMNWVRQAPGQGLKWMGWINTYTGEPTYADAFKGRVTMTRDTSISTAYM | |
| CD70 scFv (1F6), | ELSRLRSDDTAVYYCARDYGDYGMDYWGQGTTVTVSSGGGGSGGGGSGGGG | |
| IgG4 mutant hinge, | SGDIVMTQSPDSLAVSLGERATINCRASKSVSGFBRTSGYSFMHWYQQKPG | |
| CD8α transmembrane | QPPKLLIYLASNLESGVPDRFSGSGSGTDFTLTISSLQAEDVAVYYCQHSR | |
| domain, [symbol] | EVPWTFGQGTKVEIKESKYGPPCPSCPAPEFEGGPSVFLFPPKPKDTLMIS | |
| [symbol] | RTPEVTCVVVDVSQEDPEVQFNWYVDGVEVHNAKTKPREEQFQSTYRVVSV | |
| CD3z signaling domain | LTVLHQDWLNGKEYKCKVSNKGLPSSIEKTISKAKGQPREPQVYTLPPSQE | |
| | EMTKNQVSLTCLVKGFYPSDIAVEWESNGQPENNYKTTPPVLDSDGSFFLY | |
| | SRLTVDKSRWQEGNVFSCSVMHEALHNHYTQKSLSLSLGKIYIWAPLAGTC | |
| | GVLLLSLVITLYCNHRN [symbol] [symbol] | |
| | [symbol] RVKFSRSADAPAYQQGQNQLYNELNLGRREEYDVLDKRRGRD | |
| | PEMGGKPRRKNPQEGLYNELQKDKMAEAYSEIGMKGERRRGKGHDGLYQGL | |
| | STATKDTYDALHMQALPPR | |
| CAT-CD70-294 | MALPVTALLLPLALLLHAARPQVQLVQSGAEVKKPGASVKVSCKASGYTFT | 2749 |
| CD8α signal peptide, | NYGMNWVRQAPGQGLKWMGWINTYTGEPTYADAFKGRVTMTRDTSISTAYM | |
| CD70 scFv (1F6), | ELSRLRSDDTAVYYCARDYGDYGMDYWGQGTTVTVSSGGGGSGGGGSGGGG | |
| CD8α short hinge, | SGDIVMTQSPDSLAVSLGERATINCRASKSVSTSGYSFMHWYQQKPGQPPK | |
| CD8α transmembrane | LLIYLASNLESGVPDRFSGSGSGTDFTLTISSLQAEDVAVYYCQHSREVPW | |
| domain, [symbol] | TFGQGTKVEIKTTTPAPRPPTPAPTIASQPLSLRPEACRPAAGGAVHTRGL | |
| [symbol] | DFACDIYIWAPLAGTCGVLLLSLVITLYCNHRN [symbol] | |
| CD3z signaling domain | [symbol] RVKFSRSADAPAYQQGQNQLYNELNLGRREEYDVLDKRRGRDPEM | |
| | GGKPRRKNPQEGLYNELQKDKMAEAYSEIGMKGERRRGKGHDGLYQGLSTA | |
| | TKDTYDALHMQALPPR | |
| CAT-CD70-295 | MALPVTALLLPLALLLHAARPQVQLVQSGAEVKKPGASVKVSCKASGYTFT | 2751 |
| CD8α signal peptide, | NYGMNWVRQAPGQGLKWMGWINTYTGEPTYADAFKGRVTMTRDTSISTAYM | |
| CD70 scFv (1F6), | ELSRLRSDDTAVYYCARDYGDYGMDYWGQGTTVTVSSGGGGSGGGGSGGGG | |
| IgG1 short hinge, CD8α | SGDIVMTQSPDSLAVSLGERATINCRASKSVSTSGYSFMHWYQQKPGQPPK | |
| transmembrane domain, | LLIYLASNLESGVPDRFSGSGSGTDFTLTISSLQAEDVAVYYCQHSREVPW | |
| [symbol] | TEGQGTKVEIKAEPKSPDKTHTCPPCPKDPIYIWAPLAGTCGVLLLSLVIT | |
| [symbol] CD3z | LYCNHRN [symbol] RVKFSRSADAPAYQQGQNQL | |
| signaling domain | YNELNLGRREEYDVLDKRRGRDPEMGGKPRRKNPQEGLYNELQKDKMAEAY | |
| | SEIGMKGERRRGKGHDGLYQGLSTATKDTYDALHMQALPPR | |
| CAT-CD70-296 | MALPVTALLLPLALLLHAARPQVQLVQSGAEVKKPGASVKVSCKASGYTFT | 2753 |
| CD8α signal peptide, | NYGMNWVRQAPGQGLKWMGWINTYTGEPTYADAFKGRVTMTRDTSISTAYM | |
| CD70 scFv (1F6), | ELSRLRSDDTAVYYCARDYGDYGMDYWGQGTTVTVSSGGGGSGGGGSGGGG | |
| IgG4 short hinge, CD8α | SGDIVMTQSPDSLAVSLGERATINCRASKSVSTSGYSFMHWYQQKPGQPPK | |
| transmembrane domain, | LLIYLASNLESGVPDRFSGSGSGTDFTLTISSLQAEDVAVYYCQHSREVPW | |
| [symbol] | TFGQGTKVEIKESKYGPPCPSCPIYIWAPLAGTCGVLLLSLVITLYCNHRN | |
| [symbol] CD3z | [symbol] RVKFSRSADAPAYQQGQNQLYNELNLG | |
| signaling domain | RREEYDVLDKRRGRDPEMGGKPRRKNPQEGLYNELQKDKMAEAYSEIGMKG | |
| | ERRRGKGHDGLYQGLSTATKDTYDALHMQALPPR | |
| CAT-CD70-297 | MALPVTALLLPLALLLHAARPQVQLVQSGAEVKKPGASVKVSCKASGYTFT | 2755 |
| CD8α signal peptide, | NYGMNWVRQAPGQGLKWMGWINTYTGEPTYADAFKGRVTMTRDTSISTAYM | |
| CD70 scFv (1F6), | ELSRLRSDDTAVYYCARDYGDYGMDYWGQGTTVTVSSGGGGSGGGGSGGGG | |
| IgG4 hinge-CH3, CD8α | SGDIVMTQSPDSLAVSLGERATINCRASKSVSTSGYSFMHWYQQKPGQPPK | |
| transmembrane domain, | LLIYLASNLESGVPDRFSGSGSGTDFTLTISSLQAEDVAVYYCQHSREVPW | |
| [symbol] | TFGQGTKVEIKESKYGPPCPSCPGQPREPQVYTLPPSQEEMTKNQVSLTCL | |
| [symbol] CD3z | VKGFYPSDIAVEWESNGQPENNYKTTPPVLDSDGSFFLYSRLTVDKSRWQE | |
| signaling domain | GNVFSCSVMHEALHNHYTQKSLSLSLGKIYIWAPLAGTCGVLLLSLVITLY | |
| | CNHRN [symbol] [symbol] RVKFSRSADAPAYQQGQNQLYN | |
| | ELNLGRREEYDVLDKRRGRDPEMGGKPRRKNPQEGLYNELQKDKMAEAYSE | |
| | IGMKGERRRGKGHDGLYQGLSTATKDTYDALHMQALPPR | |
| CAT-CD70-298 | MALPVTALLLPLALLLHAARPQVQLVQSGAEVKKPGASVKVSCKASGYTFT | 2757 |
| CD8α signal peptide, | NYGMNWVRQAPGQGLKWMGWINTYTGEPTYADAFKGRVTMTRDTSISTAYM | |
| CD70 scFv (1F6), | ELSRLRSDDTAVYYCARDYGDYGMDYWGQGTTVTVSSGGGGSGGGGSGGGG | |
| IgG4 hinge-CH2-CH3, | SGDIVMTQSPDSLAVSLGERATINCRASKSVSTSGYSFMHWYQQKPGQPPK | |
| CD8α transmembrane | LLIYLASNLESGVPDRFSGSGSGTDFTLTISSLQAEDVAVYYCQHSREVPW | |
| domain, [symbol] | TFGQGTKVEIKESKYGPPCPSCPAPEFLGGPSVFLFPPKPKDTLMISRTPE | |
| [symbol] | VTCVVVDVSQEDPEVQFNWYVDGVEVHNAKTKPREEQFNSTYRVVSVLTVL | |
| CD3z signaling domain | HQDWLNGKEYKCKVSNKGLPSSIEKTISKAKGQPREPQVYTLPPSQEEMTK | |
| | NQVSLTCLVKGFYPSDIAVEWESNGQPENNYKTTPPVLDSDGSFFLYSRLT | |
| | VDKSRWQEGNVFSCSVMHEALHNHYTQKSLSLSLGKIYIWAPLAGTCGVLL | |
| | LSLVITLYCNHRN [symbol] [symbol] RVKFSRSADAPAYQ | |
| | QGQNQLYNELNLGRREEYDVLDKRRGRDPEMGGKPRRKNPQEGLYNELQKD | |
| | KMAEAYSEIGMKGERRRGKGHDGLYQGLSTATKDTYDALHMQALPPR | |
| CAT-CD70-299 | MALPVTALLLPLALLLHAARPQVQLVQSGAEVKKPGASVKVSCKASGYTFT | 2759 |
| CD8α signal peptide, | NYGMNWVRQAPGQGLKWMGWINTYTGEPTYADAFKGRVTMTRDTSISTAYM | |
| CD70 scFv (1F6), | ELSRLRSDDTAVYYCARDYGDYGMDYWGQGTTVTVSSGGGGSGGGGSGGGG | |
| IgG4 mutant hinge, | SGDIVMTQSPDSLAVSLGERATINCRASKSVSTSGYSFMHWYQQKPGQPPK | |
| CD8α transmembrane | LLIYLASNLESGVPDRFSGSGSGTDFTLTISSLQAEDVAVYYCQHSREVPW | |
| domain, [symbol] | TFGQGTKVEIKESKYGPPCPSCPAPEFEGGPSVFLFPPKPKDTLMISRTPE | |
| [symbol] | VTCVVVDVSQEDPEVQFNWYVDGVEVHNAKTKPREEQFQSTYRVVSVLTVL | |
| CD3z signaling domain | HQDWLNGKEYKCKVSNKGLPSSIEKTISKAKGQPREPQVYTLPPSQEEMTK | |
| | NQVSLTCLVKGFYPSDIAVEWESNGQPENNYKTTPPVLDSDGSFFLYSRLT | |
| | VDKSRWQEGNVFSCSVMHEALHNHYTQKSLSLSLGKIYIWAPLAGTCGVLL | |
| | LSLVITLYCNHRN [symbol] [symbol] RVKFSRSADAPAYQ | |
| | QGQNQLYNELNLGRREEYDVLDKRRGRDPEMGGKPRRKNPQEGLYNELQKD | |
| | i | |
| CAT-CD 70-300 | MALPVTALLLPLALLLHAARPQVQLVQSGAEVKKPGASVKVSCKASGYTFT | 2761 |
| CD8α signal peptide, | NYGMNWVRQAPGQGLKWMGWINTYTGEPTYADAFKGRVTMTRDTSISTAYM | |
| CD70 scFv (1F6), | ELSRLRSDDTAVYYCARDYGDYGMDYWGQGTTVTVSSGGGGSGGGGSGGGG | |
| CD8α short hinge, | SGDIVMTQSPDSLAVSLGERATINCRASKSVSTSGYSFMHWYQQKPGQPPK | |
| CD8α transmembrane | LLIYLASNLESGVPDRFSGSGSGTDFTLTISSLQAEDVAVYYCQHSREVPW | |
| domain, [symbol] | TFGQGTKVEIKTTTPAPRPPTPAPTIASQPLSLRPEACRPAAGGAVHTRGL | |
| [symbol] | DFACDIYIWAPLAGTCGVLLLSLVITLYCNHRN [symbol] | |
| CD3z signaling domain | [symbol] [symbol] RVKFSRSADAPAYQQGQNQLYNELNLG | |
| | RREEYDVLDKRRGRDPEMGGKPRRKNPQEGLYNELQKDKMAEAYSEIGMKG | |
| | ERRRGKGHDGLYQGLSTATKDTYDALHMQALPPR | |
| CAT-CD 70-301 | MALPVTALLLPLALLLHAARPQVQLVQSGAEVKKPGASVKVSCKASGYTFT | 2763 |
| CD8α signal peptide, | NYGMNWVRQAPGQGLKWMGWINTYTGEPTYADAFKGRVTMTRDTSISTAYM | |
| CD70 scFv (1F6), | ELSRLRSDDTAVYYCARDYGDYGMDYWGQGTTVTVSSGGGGSGGGGSGGGG | |
| IgG1 short hinge, CD8α | SGDIVMTQSPDSLAVSLGERATINCRASKSVSTSGYSFMHWYQQKPGQPPK | |
| transmembrane domain, | LLIYLASNLESGVPDRFSGSGSGTDFTLTISSLQAEDVAVYYCQHSREVPW | |
| [symbol] | TFGQGTKVEIKAEPKSPDKTHTCPPCPKDPIYIWAPLAGTCGVLLLSLVIT | |
| [symbol] CD3z | LYCNHRN [symbol] [symbol] RV | |
| signaling domain | KFSRSADAPAYQQGQNQLYNELNLGRREEYDVLDKRRGRDPEMGGKPRRKN | |
| | PQEGLYNELQKDKMAEAYSEIGMKGERRRGKGHDGLYQGLSTATKDTYDAL | |
| | HMQALPPR | |
| CAT-CD 70-302 | MALPVTALLLPLALLLHAARPQVQLVQSGAEVKKPGASVKVSCKASGYTFT | 2765 |
| CD8α signal peptide, | NYGMNWVRQAPGQGLKWMGWINTYTGEPTYADAFKGRVTMTRDTSISTAYM | |
| CD70 scFv (1F6), | ELSRLRSDDTAVYYCARDYGDYGMDYWGQGTTVTVSSGGGGSGGGGSGGGG | |
| IgG4 short hinge, CD8α | SGDIVMTQSPDSLAVSLGERATINCRASKSVSTSGYSFMHWYQQKPGQPPK | |
| transmembrane domain, | LLIYLASNLESGVPDRFSGSGSGTDFTLTISSLQAEDVAVYYCQHSREVPW | |
| [symbol] | TFGQGTKVEIKESKYGPPCPSCPIYIWAPLAGTCGVLLLSLVITLYCNHRN | |
| [symbol] CD3z | [symbol] [symbol] RVKFSRSAD | |
| signaling domain | APAYQQGQNQLYNELNLGRREEYDVLDKRRGRDPEMGGKPRRKNPQEGLYN | |
| | ELQKDKMAEAYSEIGMKGERRRGKGHDGLYQGLSTATKDTYDALHMQALPP | |
| | R | |
| CAT-CD 70-303 | MALPVTALLLPLALLLHAARPQVQLVQSGAEVKKPGASVKVSCKASGYTFT | 2767 |
| CD8α signal peptide, | NYGMNWVRQAPGQGLKWMGWINTYTGEPTYADAFKGRVTMTRDTSISTAYM | |
| CD70 scFv (1F6), | ELSRLRSDDTAVYYCARDYGDYGMDYWGQGTTVTVSSGGGGSGGGGSGGGG | |
| IgG4 hinge-CH3, CD8α | SGDIVMTQSPDSLAVSLGERATINCRASKSVSTSGYSFMHWYQQKPGQPPK | |
| transmembrane domain, | LLIYLASNLESGVPDRFSGSGSGTDFTLTISSLQAEDVAVYYCQHSREVPW | |
| [symbol] | TEGQGTKVEIKESKYGPPCPSCPGQPREPQVYTLPPSQEEMTKNQVSLTCL | |
| [symbol] CD3z | VKGFYPSDIAVEWESNGQPENNYKTTPPVLDSDGSFFLYSRLTVDKSRWQE | |
| signaling domain | GNVFSCSVMHEALHNHYTQKSLSLSLGKIYIWAPLAGTCGVLLLSLVITLY | |
| | CNHRN [symbol] [symbol] [symbol] RVKF | |
| | SRSADAPAYQQGQNQLYNELNLGRREEYDVLDKRRGRDPEMGGKPRRKNPQ | |
| | EGLYNELQKDKMAEAYSEIGMKGERRRGKGHDGLYQGLSTATKDTYDALHM | |
| | QALPPR | |
| CAT-CD 70-304 | MALPVTALLLPLALLLHAARPQVQLVQSGAEVKKPGASVKVSCKASGYTFT | 2769 |
| CD8α signal peptide, | NYGMNWVRQAPGQGLKWMGWINTYTGEPTYADAFKGRVTMTRDTSISTAYM | |
| CD70 scFv (1F6), | ELSRLRSDDTAVYYCARDYGDYGMDYWGQGTTVTVSSGGGGSGGGGSGGGG | |
| IgG4 hinge-CH2-CH3, | SGDIVMTQSPDSLAVSLGERATINCRASKSVSTSGYSFMHWYQQKPGQPPK | |
| CD8α transmembrane | LLIYLASNLESGVPDRFSGSGSGTDFTLTISSLQAEDVAVYYCQHSREVPW | |
| domain, [symbol] | TFGQGTKVEIKESKYGPPCPSCPAPEFLGGPSVFLFPPKPKDTLMISRTPE | |
| [symbol] | VTCVVVDVSQEDPEVQFNWYVDGVEVHNAKTKPREEQFNSTYRVVSVLTVL | |
| CD3z signaling domain | HQDWLNGKEYKCKVSNKGLPSSIEKTISKAKGQPREPQVYTLPPSQEEMTK | |
| | NQVSLTCLVKGFYPSDIAVEWESNGQPENNYKTTPPVLDSDGSFFLYSRLT | |
| | VDKSRWQEGNVFSCSVMHEALHNHYTQKSLSLSLGKIYIWAPLAGTCGVLL | |
| | LSLVITLYCNHRN [symbol] [symbol] | |
| | [symbol] RVKFSRSADAPAYQQGQNQLYNELNLGRREEYDVLDKRRGRDPEMGG | |
| | KPRRKNPQEGLYNELQKDKMAEAYSEIGMKGERRRGKGHDGLYQGLSTATK | |
| | DTYDALHMQALPPR | |
| CAT-CD 70-305 | MALPVTALLLPLALLLHAARPQVQLVQSGAEVKKPGASVKVSCKASGYTFT | 2771 |
| CD8α signal peptide, | NYGMNWVRQAPGQGLKWMGWINTYTGEPTYADAFKGRVTMTRDTSISTAYM | |
| CD70 scFv (1F6), | ELSRLRSDDTAVYYCARDYGDYGMDYWGQGTTVTVSSGGGGSGGGGSGGGG | |
| IgG4 mutant hinge, | SGDIVMTQSPDSLAVSLGERATINCRASKSVSTSGYSFMHWYQQKPGQPPK | |
| CD8α transmembrane | LLIYLASNLESGVPDRFSGSGSGTDFTLTISSLQAEDVAVYYCQHSREVPW | |
| domain, [symbol] | TFGQGTKVEIKESKYGPPCPSCPAPEFEGGPSVFLFPPKPKDTLMISRTPE | |
| [symbol] | VTCVVVDVSQEDPEVQFNWYVDGVEVHNAKTKPREEQFQSTYRVVSVLTVL | |
| CD3z signaling domain | HQDWLNGKEYKCKVSNKGLPSSIEKTISKAKGQPREPQVYTLPPSQEEMTK | |
| | NQVSLTCLVKGFYPSDIAVEWESNGQPENNYKTTPPVLDSDGSFFLYSRLT | |
| | VDKSRWQEGNVFSCSVMHEALHNHYTQKSLSLSLGKIYIWAPLAGTCGVLL | |
| | LSLVITLYCNHRN [symbol] [symbol] | |
| | [symbol] RVKFSRSADAPAYQQGQNQLYNELNLGRREEYDVLDKRRGRDPEMGG | |
| | KPRRKNPQEGLYNELQKDKMAEAYSEIGMKGERRRGKGHDGLYQGLSTATK | |
| | DTYDALHMQALPPR | |
| CAT-CD 70-306 | MALPVTALLLPLALLLHAARPQVQLVQSGAEVKKPGASVKVSCKASGYTFT | 2773 |
| CD8α signal peptide, | NYGMNWVRQAPGQGLKWMGWINTYTGEPTYADAFKGRVTMTRDTSISTAYM | |
| CD70 scFv (1F6), | ELSRLRSDDTAVYYCARDYGDYGMDYWGQGTTVTVSSGGGGSGGGGSGGGG | |
| CD8α short hinge, | SGDIVMTQSPDSLAVSLGERATINCRASKSVSTSGYSFMHWYQQKPGQPPK | |
| CD28 transmembrane | LLIYLASNLESGVPDRFSGSGSGTDFTLTISSLQAEDVAVYYCQHSREVPW | |
| domain, [symbol] | TFGQGTKVEIKTTTPAPRPPTPAPTIASQPLSLRPEACRPAAGGAVHTRGL | |
| [symbol] | DFACDFWVLVVVGGVLACYSLLVTVAFIIFWV [symbol] | |
| DAP12 signaling | [symbol] YFLGRLVPRGRGAAEAATRKQRITETESP | |
| domain | YQELQGQRSDVYSDLNTQRPYYK | |
| CAT-CD 70-307 | MALPVTALLLPLALLLHAARPQVQLVQSGAEVKKPGASVKVSCKASGYTFT | 2775 |
| CD8α signal peptide, | NYGMNWVRQAPGQGLKWMGWINTYTGEPTYADAFKGRVTMTRDTSISTAYM | |
| CD70 scFv (1F6), | ELSRLRSDDTAVYYCARDYGDYGMDYWGQGTTVTVSSGGGGSGGGGSGGGG | |
| IgG1 short hinge, CD28 | SGDIVMTQSPDSLAVSLGERATINCRASKSVSTSGYSFMHWYQQKPGQPPK | |
| transmembrane domain, | LLIYLASNLESGVPDRFSGSGSGTDFTLTISSLQAEDVAVYYCQHSREVPW | |
| [symbol] | TFGQGTKVEIKAEPKSPDKTHTCPPCPKDPFWVLVVVGGVLACYSLLVTVA | |
| [symbol] DAP12 | FIIFWV [symbol] [symbol] YFLG | |
| signaling domain | RLVPRGRGAAEAATRKQRITETESPYQELQGQRSDVYSDLNTQRPYYK | |
| CAT-CD 70-308 | MALPVTALLLPLALLLHAARPQVQLVQSGAEVKKPGASVKVSCKASGYTFT | 2777 |
| CD8α signal peptide, | NYGMNWVRQAPGQGLKWMGWINTYTGEPTYADAFKGRVTMTRDTSISTAYM | |
| CD70 scFv (1F6), | ELSRLRSDDTAVYYCARDYGDYGMDYWGQGTTVTVSSGGGGSGGGGSGGGG | |
| IgG4 short hinge, CD28 | SGDIVMTQSPDSLAVSLGERATINCRASKSVSTSGYSFMHWYQQKPGQPPK | |
| transmembrane domain, | LLIYLASNLESGVPDRFSGSGSGTDFTLTISSLQAEDVAVYYCQHSREVPW | |
| [symbol] | TFGQGTKVEIKESKYGPPCPSCPFWVLVVVGGVLACYSLLVTVAFIIFWV [symbol] | |
| [symbol] DAP12 | [symbol] [symbol] YFLGRLVPRGR | |
| signaling domain | GAAEAATRKQRITETESPYQELQGQRSDVYSDLNTQRPYYK | |
| CAT-CD 70-309 | MALPVTALLLPLALLLHAARPQVQLVQSGAEVKKPGASVKVSCKASGYTFT | 2779 |
| CD8α signal peptide, | NYGMNWVRQAPGQGLKWMGWINTYTGEPTYADAFKGRVTMTRDTSISTAYM | |
| CD70 scFv (1F6), | ELSRLRSDDTAVYYCARDYGDYGMDYWGQGTTVTVSSGGGGSGGGGSGGGG | |
| IgG4 hinge-CH3, CD28 | SGDIVMTQSPDSLAVSLGERATINCRASKSVSTSGYSFMHWYQQKPGQPPK | |
| transmembrane domain, | LLIYLASNLESGVPDRFSGSGSGTDFTLTISSLQAEDVAVYYCQHSREVPW | |
| [symbol] | TFGQGTKVEIKESKYGPPCPSCPGQPREPQVYTLPPSQEEMTKNQVSLTCL | |
| [symbol] DAP12 | VKGFYPSDIAVEWESNGQPENNYKTTPPVLDSDGSFFLYSRLTVDKSRWQE | |
| signaling domain | GNVFSCSVMHEALHNHYTQKSLSLSLGKFWVLVVVGGVLACYSLLVTVAFI | |
| | IFWV [symbol] [symbol] YFLGRL | |
| | VPRGRGAAEAATRKQRITETESPYQELQGQRSDVYSDLNTQRPYYK | |
| CAT-CD 70-310 | MALPVTALLLPLALLLHAARPQVQLVQSGAEVKKPGASVKVSCKASGYTFT | 2781 |
| CD8α signal peptide, | NYGMNWVRQAPGQGLKWMGWINTYTGEPTYADAFKGRVTMTRDTSISTAYM | |
| CD70 scFv (1F6), | ELSRLRSDDTAVYYCARDYGDYGMDYWGQGTTVTVSSGGGGSGGGGSGGGG | |
| IgG4 hinge-CH2-CH3, | SGDIVMTQSPDSLAVSLGERATINCRASKSVSTSGYSFMHWYQQKPGQPPK | |
| CD28 transmembrane | LLIYLASNLESGVPDRFSGSGSGTDFTLTISSLQAEDVAVYYCQHSREVPW | |
| domain, [symbol] | TEGQGTKVEIKESKYGPPCPSCPAPEFLGGPSVFLFPPKPKDTLMISRTPE | |
| [symbol] | VTCVVVDVSQEDPEVQFNWYVDGVEVHNAKTKPREEQFNSTYRVVSVLTVL | |
| DAP12 signaling | HQDWLNGKEYKCKVSNKGLPSSIEKTISKAKGQPREPQVYTLPPSQEEMTK | |
| domain | NQVSLTCLVKGFYPSDIAVEWESNGQPENNYKTTPPVLDSDGSFFLYSRLT | |
| | VDKSRWQEGNVFSCSVMHEALHNHYTQKSLSLSLGKFWVLVVVGGVLACYS | |
| | LLVTVAFIIFWV [symbol] | |
| | [symbol] YFLGRLVPRGRGAAEAATRKQRITETESPYQELQGQRSDVYSDLNTQRP | |
| | YYK | |
| CAT-CD70-311 | MALPVTALLLPLALLLHAARPQVQLVQSGAEVKKPGASVKVSCKASGYTFT | 2783 |
| CD8α signal peptide, | NYGMNWVRQAPGQGLKWMGWINTYTGEPTYADAFKGRVTMTRDTSISTAYM | |
| CD70 scFv (1F6), | ELSRLRSDDTAVYYCARDYGDYGMDYWGQGTTVTVSSGGGGSGGGGSGGGG | |
| IgG4 mutant hinge, | SGDIVMTQSPDSLAVSLGERATINCRASKSVSTSGYSFMHWYQQKPGQPPK | |
| CD28 transmembrane | LLIYLASNLESGVPDRFSGSGSGTDFTLTISSLQAEDVAVYYCQHSREVPW | |
| domain, [symbol] | TEGQGTKVEIKESKYGPPCPSCPAPEFEGGPSVFLFPPKPKDTLMISRTPE | |
| [symbol] | VTCVVVDVSQEDPEVQFNWYVDGVEVHNAKTKPREEQFQSTYRVVSVLTVL | |
| DAP12 signaling | HQDWLNGKEYKCKVSNKGLPSSIEKTISKAKGQPREPQVYTLPPSQEEMTK | |
| domain | NQVSLTCLVKGFYPSDIAVEWESNGQPENNYKTTPPVLDSDGSFFLYSRLT | |
| | VDKSRWQEGNVFSCSVMHEALHNHYTQKSLSLSLGKFWVLVVVGGVLACYS | |
| | LLVTVAFIIFWV [symbol] [symbol] | |
| | [symbol] YFLGRLVPRGRGAAEAATRKQRITETESPYQELQGQRSDVYSDLNTQRP | |
| | YYK | |
| CAT-CD 70-312 | MALPVTALLLPLALLLHAARPQVQLVQSGAEVKKPGASVKVSCKASGYTFT | 2785 |
| CD8α signal peptide, | NYGMNWVRQAPGQGLKWMGWINTYTGEPTYADAFKGRVTMTRDTSISTAYM | |
| CD70 scFv (1F6), | ELSRLRSDDTAVYYCARDYGDYGMDYWGQGTTVTVSSGGGGSGGGGSGGGG | |
| CD8α short hinge, | SGDIVMTQSPDSLAVSLGERATINCRASKSVSTSGYSFMHWYQQKPGQPPK | |
| CD28 transmembrane | LLIYLASNLESGVPDRFSGSGSGTDFTLTISSLQAEDVAVYYCQHSREVPW | |
| domain, [symbol] | TFGQGTKVEIKTTTPAPRPPTPAPTIASQPLSLRPEACRPAAGGAVHTRGL | |
| [symbol] | DFACDFWVLVVVGGVLACYSLLVTVAFIIFWV [symbol] | |
| CD3z signaling domain | [symbol] RVKFSRSADAPAYQQGQNQLYNELNLGRR | |
| | EEYDVLDKRRGRDPEMGGKPRRKNPQEGLYNELQKDKMAEAYSEIGMKGER | |
| | RRGKGHDGLYQGLSTATKDTYDALHMQALPPR | |
| CAT-CD70-360 | MALPVTALLLPLALLLHAARPQVQLVQSGAEVKKPGASVKVSCKASGYTFT | 2787 |
| CD8α signal peptide, | NYGMNWVRQAPGQGLKWMGWINTYTGEPTYADAFKGRVTMTRDTSISTAYM | |
| CD70 scFv (1F6), | ELSRLRSDDTAVYYCARDYGDYGMDYWGQGTTVTVSSGGGGSGGGGSGGGG | |
| IgG1 short hinge, CD28 | SGDIVMTQSPDSLAVSLGERATINCRASKSVSTSGYSFMHWYQQKPGQPPK | |
| transmembrane domain, | LLIYLASNLESGVPDRFSGSGSGTDFTLTISSLQAEDVAVYYCQHSREVPW | |
| [symbol] | TFGQGTKVEIKAEPKSPDKTHTCPPCPKDPFWVLVVVGGVLACYSLLVTVA | |
| [symbol] CD3z | FIIFWV [symbol] [symbol] RVKF | |
| signaling domain | SRSADAPAYQQGQNQLYNELNLGRREEYDVLDKRRGRDPEMGGKPRRKNPQ | |
| | EGLYNELQKDKMAEAYSEIGMKGERRRGKGHDGLYQGLSTATKDTYDALHM | |
| | QALPPR | |
| CAT-CD 70-313 | MALPVTALLLPLALLLHAARPQVQLVQSGAEVKKPGASVKVSCKASGYTFT | 2789 |
| CD8α signal peptide, | NYGMNWVRQAPGQGLKWMGWINTYTGEPTYADAFKGRVTMTRDTSISTAYM | |
| CD70 scFv (1F6), | ELSRLRSDDTAVYYCARDYGDYGMDYWGQGTTVTVSSGGGGSGGGGSGGGG | |
| IgG4 short hinge, CD28 | SGDIVMTQSPDSLAVSLGERATINCRASKSVSTSGYSFMHWYQQKPGQPPK | |
| transmembrane domain, | LLIYLASNLESGVPDRFSGSGSGTDFTLTISSLQAEDVAVYYCQHSREVPW | |
| [symbol] | TFGQGTKVEIKESKYGPPCPSCPFWVLVVVGGVLACYSLLVTVAFIIFWV [symbol] | |
| [symbol] CD3z | [symbol] [symbol] RVKFSRSADAP | |
| signaling domain | AYQQGQNQLYNELNLGRREEYDVLDKRRGRDPEMGGKPRRKNPQEGLYNEL | |
| | QKDKMAEAYSEIGMKGERRRGKGHDGLYQGLSTATKDTYDALHMQALPPR | |
| CAT-CD 70-314 | MALPVTALLLPLALLLHAARPQVQLVQSGAEVKKPGASVKVSCKASGYTFT | 2791 |
| CD8α signal peptide, | NYGMNWVRQAPGQGLKWMGWINTYTGEPTYADAFKGRVTMTRDTSISTAYM | |
| CD70 scFv (1F6), | ELSRLRSDDTAVYYCARDYGDYGMDYWGQGTTVTVSSGGGGSGGGGSGGGG | |
| IgG4 hinge-CH3, CD28 | SGDIVMTQSPDSLAVSLGERATINCRASKSVSTSGYSFMHWYQQKPGQPPK | |
| transmembrane domain, | LLIYLASNLESGVPDRFSGSGSGTDFTLTISSLQAEDVAVYYCQHSREVPW | |
| [symbol] | TFGQGTKVEIKESKYGPPCPSCPGQPREPQVYTLPPSQEEMTKNQVSLTCL | |
| [symbol] CD3z | VKGFYPSDIAVEWESNGQPENNYKTTPPVLDSDGSFFLYSRLTVDKSRWQE | |
| signaling domain | GNVFSCSVMHEALHNHYTQKSLSLSLGKFWVLVVVGGVLACYSLLVTVAFI | |
| | IFWV [symbol] [symbol] RVKFSR | |
| | SADAPAYQQGQNQLYNELNLGRREEYDVLDKRRGRDPEMGGKPRRKNPQEG | |
| | LYNELQKDKMAEAYSEIGMKGERRRGKGHDGLYQGLSTATKDTYDALHMQA | |
| | LPPR | |
| CAT-CD 70-315 | MALPVTALLLPLALLLHAARPQVQLVQSGAEVKKPGASVKVSCKASGYTFT | 2793 |
| CD8α signal peptide, | NYGMNWVRQAPGQGLKWMGWINTYTGEPTYADAFKGRVTMTRDTSISTAYM | |
| CD70 scFv (1F6), | ELSRLRSDDTAVYYCARDYGDYGMDYWGQGTTVTVSSGGGGSGGGGSGGGG | |
| IgG4 hinge-CH2-CH3, | SGDIVMTQSPDSLAVSLGERATINCRASKSVSTSGYSFMHWYQQKPGQPPK | |
| CD28 transmembrane | LLIYLASNLESGVPDRFSGSGSGTDFTLTISSLQAEDVAVYYCQHSREVPW | |
| domain, [symbol] | TFGQGTKVEIKESKYGPPCPSCPAPEFLGGPSVFLFPPKPKDTLMISRTPE | |
| [symbol] | VTCVVVDVSQEDPEVQFNWYVDGVEVHNAKTKPREEQFNSTYRVVSVLTVL | |
| CD3z signaling domain | HQDWLNGKEYKCKVSNKGLPSSIEKTISKAKGQPREPQVYTLPPSQEEMTK | |
| | NQVSLTCLVKGFYPSDIAVEWESNGQPENNYKTTPPVLDSDGSFFLYSRLT | |
| | VDKSRWQEGNVFSCSVMHEALHNHYTQKSLSLSLGKFWVLVVVGGVLACYS | |
| | LLVTVAFIIFWV [symbol] [symbol] | |
| | [symbol] RVKFSRSADAPAYQQGQNQLYNELNLGRREEYDVLDKRRGRDPEMGGKP | |
| | RRKNPQEGLYNELQKDKMAEAYSEIGMKGERRRGKGHDGLYQGLSTATKDT | |
| | YDALHMQALPPR | |
| CAT-CD 70-316 | MALPVTALLLPLALLLHAARPQVQLVQSGAEVKKPGASVKVSCKASGYTFT | 2795 |
| CD8α signal peptide, | NYGMNWVRQAPGQGLKWMGWINTYTGEPTYADAFKGRVTMTRDTSISTAYM | |
| CD70 scFv (1F6), | ELSRLRSDDTAVYYCARDYGDYGMDYWGQGTTVTVSSGGGGSGGGGSGGGG | |
| IgG4 mutant hinge, | SGDIVMTQSPDSLAVSLGERATINCRASKSVSTSGYSFMHWYQQKPGQPPK | |
| CD28 transmembrane | LLIYLASNLESGVPDRFSGSGSGTDFTLTISSLQAEDVAVYYCQHSREVPW | |
| domain, [symbol] | TFGQGTKVEIKESKYGPPCPSCPAPEFEGGPSVFLFPPKPKDTLMISRTPE | |
| [symbol] | VTCVVVDVSQEDPEVQFNWYVDGVEVHNAKTKPREEQFQSTYRVVSVLTVL | |
| CD3z signaling domain | HQDWLNGKEYKCKVSNKGLPSSIEKTISKAKGQPREPQVYTLPPSQEEMTK | |
| | NQVSLTCLVKGFYPSDIAVEWESNGQPENNYKTTPPVLDSDGSFFLYSRLT | |
| | VDKSRWQEGNVFSCSVMHEALHNHYTQKSLSLSLGKFWVLVVVGGVLACYS | |
| | LLVTVAFIIFWV [symbol] [symbol] | |
| | [symbol] RVKFSRSADAPAYQQGQNQLYNELNLGRREEYDVLDKRRGRDPEMGGKP | |
| | RRKNPQEGLYNELQKDKMAEAYSEIGMKGERRRGKGHDGLYQGLSTATKDT | |
| | YDALHMQALPPR | |
| CAT-CD 70-317 | MALPVTALLLPLALLLHAARPQVQLVQSGAEVKKPGASVKVSCKASGYTFT | 2797 |
| CD8α signal peptide, | NYGMNWVRQAPGQGLKWMGWINTYTGEPTYADAFKGRVTMTRDTSISTAYM | |
| CD70 scFv (1F6), | ELSRLRSDDTAVYYCARDYGDYGMDYWGQGTTVTVSSGGGGSGGGGSGGGG | |
| CD8α short hinge, | SGDIVMTQSPDSLAVSLGERATINCRASKSVSTSGYSFMHWYQQKPGQPPK | |
| CD28 transmembrane | LLIYLASNLESGVPDRFSGSGSGTDFTLTISSLQAEDVAVYYCQHSREVPW | |
| domain, [symbol] | TFGQGTKVEIKTTTPAPRPPTPAPTIASQPLSLRPEACRPAAGGAVHTRGL | |
| [symbol] | DFACDFWVLVVVGGVLACYSLLVTVAFIIFWV [symbol] | |
| OX40L signaling | [symbol] ERVQPLEENVGNAARPRFERNKRVKFSRS | |
| domain, CD3z | ADAPAYQQGQNQLYNELNLGRREEYDVLDKRRGRDPEMGGKPRRKNPQEGL | |
| signaling domain | YNELQKDKMAEAYSEIGMKGERRRGKGHDGLYQGLSTATKDTYDALHMQAL | |
| | PPR | |
| CAT-CD 70-318 | MALPVTALLLPLALLLHAARPQVQLVQSGAEVKKPGASVKVSCKASGYTFT | 2799 |
| CD8α signal peptide, | NYGMNWVRQAPGQGLKWMGWINTYTGEPTYADAFKGRVTMTRDTSISTAYM | |
| CD70 scFv (1F6), | ELSRLRSDDTAVYYCARDYGDYGMDYWGQGTTVTVSSGGGGSGGGGSGGGG | |
| CD8α hinge, CD28 | SGDIVMTQSPDSLAVSLGERATINCRASKSVSTSGYSFMHWYQQKPGQPPK | |
| transmembrane domain, | LLIYLASNLESGVPDRFSGSGSGTDFTLTISSLQAEDVAVYYCQHSREVPW | |
| [symbol] | TFGQGTKVEIKFVPVFLPAKPTTTPAPRPPTPAPTIASQPLSLRPEACRPA | |
| [symbol] OX40L | AGGAVHTRGLDFACDFWVLVVVGGVLACYSLLVTVAFIIFWV [symbol] | |
| signaling domain, | [symbol] [symbol] ERVQPLEENVGNAARPRFE | |
| CD3z signaling domain | RNKRVKFSRSADAPAYQQGQNQLYNELNLGRREEYDVLDKRRGRDPEMGGK | |
| | PRRKNPQEGLYNELQKDKMAEAYSEIGMKGERRRGKGHDGLYQGLSTATKD | |
| | TYDALHMQALPPR | |
| CAT-CD 70-319 | MALPVTALLLPLALLLHAARPQVQLVQSGAEVKKPGASVKVSCKASGYTFT | 2801 |
| CD8α signal peptide, | NYGMNWVRQAPGQGLKWMGWINTYTGEPTYADAFKGRVTMTRDTSISTAYM | |
| CD70 scFv (1F6), | ELSRLRSDDTAVYYCARDYGDYGMDYWGQGTTVTVSSGGGGSGGGGSGGGG | |
| IgG1 short hinge, CD28 | SGDIVMTQSPDSLAVSLGERATINCRASKSVSTSGYSFMHWYQQKPGQPPK | |
| transmembrane domain, | LLIYLASNLESGVPDRFSGSGSGTDFTLTISSLQAEDVAVYYCQHSREVPW | |
| [symbol] | TFGQGTKVEIKAEPKSPDKTHTCPPCPKDPFWVLVVVGGVLACYSLLVTVA | |
| [symbol] OX40L | FIIFWV [symbol] [symbol] ERVQ | |
| signaling domain, | PLEENVGNAARPRFERNKRVKFSRSADAPAYQQGQNQLYNELNLGRREEYD | |
| CD3z signaling domain | VLDKRRGRDPEMGGKPRRKNPQEGLYNELQKDKMAEAYSEIGMKGERRRGK | |
| | GHDGLYQGLSTATKDTYDALHMQALPPR | |
| CAT-CD 70-320 | MALPVTALLLPLALLLHAARPQVQLVQSGAEVKKPGASVKVSCKASGYTFT | 2803 |
| CD8α signal peptide, | NYGMNWVRQAPGQGLKWMGWINTYTGEPTYADAFKGRVTMTRDTSISTAYM | |
| CD70 scFv (1F6), | ELSRLRSDDTAVYYCARDYGDYGMDYWGQGTTVTVSSGGGGSGGGGSGGGG | |
| IgG4 short hinge, CD28 | SGDIVMTQSPDSLAVSLGERATINCRASKSVSTSGYSFMHWYQQKPGQPPK | |
| transmembrane domain, | LLIYLASNLESGVPDRFSGSGSGTDFTLTISSLQAEDVAVYYCQHSREVPW | |
| [symbol] | TFGQGTKVEIKESKYGPPCPSCPFWVLVVVGGVLACYSLLVTVAFIIFWV [symbol] | |
| [symbol] OX40L | [symbol] [symbol] ERVQPLEENVG | |
| signaling domain, | NAARPRFERNKRVKFSRSADAPAYQQGQNQLYNELNLGRREEYDVLDKRRG | |
| CD3z signaling domain | RDPEMGGKPRRKNPQEGLYNELQKDKMAEAYSEIGMKGERRRGKGHDGLYQ | |
| | GLSTATKDTYDALHMQALPPR | |
| CAT-CD70-321 | MALPVTALLLPLALLLHAARPQVQLVQSGAEVKKPGASVKVSCKASGYTFT | 2805 |
| CD8α signal peptide, | NYGMNWVRQAPGQGLKWMGWINTYTGEPTYADAFKGRVTMTRDTSISTAYM | |
| CD70 scFv (1F6), | ELSRLRSDDTAVYYCARDYGDYGMDYWGQGTTVTVSSGGGGSGGGGSGGGG | |
| IgG4 hinge-CH3, CD28 | SGDIVMTQSPDSLAVSLGERATINCRASKSVSTSGYSFMHWYQQKPGQPPK | |
| transmembrane domain, | LLIYLASNLESGVPDRFSGSGSGTDFTLTISSLQAEDVAVYYCQHSREVPW | |
| [symbol] | TEGQGTKVEIKESKYGPPCPSCPGQPREPQVYTLPPSQEEMTKNQVSLTCL | |
| [symbol] OX40L | VKGFYPSDIAVEWESNGQPENNYKTTPPVLDSDGSFFLYSRLTVDKSRWQE | |
| signaling domain, | GNVFSCSVMHEALHNHYTQKSLSLSLGKFWVLVVVGGVLACYSLLVTVAFI | |
| CD3z signaling domain | IFWV [symbol] [symbol] ERVQPL | |
| | EENVGNAARPRFERNKRVKFSRSADAPAYQQGQNQLYNELNLGRREEYDVL | |
| | DKRRGRDPEMGGKPRRKNPQEGLYNELQKDKMAEAYSEIGMKGERRRGKGH | |
| | DGLYQGLSTATKDTYDALHMQALPPR | |
| CAT-CD 70-322 | MALPVTALLLPLALLLHAARPQVQLVQSGAEVKKPGASVKVSCKASGYTFT | 2807 |
| CD8α signal peptide, | NYGMNWVRQAPGQGLKWMGWINTYTGEPTYADAFKGRVTMTRDTSISTAYM | |
| CD70 scFv (1F6), | ELSRLRSDDTAVYYCARDYGDYGMDYWGQGTTVTVSSGGGGSGGGGSGGGG | |
| IgG4 hinge-CH2-CH3, | SGDIVMTQSPDSLAVSLGERATINCRASKSVSTSGYSFMHWYQQKPGQPPK | |
| CD28 transmembrane | LLIYLASNLESGVPDRFSGSGSGTDFTLTISSLQAEDVAVYYCQHSREVPW | |
| domain, [symbol] | TFGQGTKVEIKESKYGPPCPSCPAPEFLGGPSVFLFPPKPKDTLMISRTPE | |
| [symbol] | VTCVVVDVSQEDPEVQFNWYVDGVEVHNAKTKPREEQFNSTYRVVSVLTVL | |
| OX40L signaling | HQDWLNGKEYKCKVSNKGLPSSIEKTISKAKGQPREPQVYTLPPSQEEMTK | |
| domain, CD3z | NQVSLTCLVKGFYPSDIAVEWESNGQPENNYKTTPPVLDSDGSFFLYSRLT | |
| signaling domain | VDKSRWQEGNVFSCSVMHEALHNHYTQKSLSLSLGKFWVLVVVGGVLACYS | |
| | LLVTVAFIIFWV [symbol] [symbol] | |
| | [symbol] ERVQPLEENVGNAARPRFERNKRVKFSRSADAPAYQQGQNQLYNELNLG | |
| | RREEYDVLDKRRGRDPEMGGKPRRKNPQEGLYNELQKDKMAEAYSEIGMKG | |
| | ERRRGKGHDGLYQGLSTATKDTYDALHMQALPPR | |
| CAT-CD 70-323 | MALPVTALLLPLALLLHAARPQVQLVQSGAEVKKPGASVKVSCKASGYTFT | 2809 |
| CD8α signal peptide, | NYGMNWVRQAPGQGLKWMGWINTYTGEPTYADAFKGRVTMTRDTSISTAYM | |
| CD70 scFv (1F6), | ELSRLRSDDTAVYYCARDYGDYGMDYWGQGTTVTVSSGGGGSGGGGSGGGG | |
| IgG4 mutant hinge, | SGDIVMTQSPDSLAVSLGERATINCRASKSVSTSGYSFMHWYQQKPGQPPK | |
| CD28 transmembrane | LLIYLASNLESGVPDRFSGSGSGTDFTLTISSLQAEDVAVYYCQHSREVPW | |
| domain, [symbol] | TFGQGTKVEIKESKYGPPCPSCPAPEFEGGPSVFLFPPKPKDTLMISRTPE | |
| [symbol] | VTCVVVDVSQEDPEVQFNWYVDGVEVHNAKTKPREEQFQSTYRVVSVLTVL | |
| OX40L signaling | HQDWLNGKEYKCKVSNKGLPSSIEKTISKAKGQPREPQVYTLPPSQEEMTK | |
| domain, CD3z | NQVSLTCLVKGFYPSDIAVEWESNGQPENNYKTTPPVLDSDGSFFLYSRLT | |
| signaling domain | VDKSRWQEGNVFSCSVMHEALHNHYTQKSLSLSLGKFWVLVVVGGVLACYS | |
| | LLVTVAFIIFWV [symbol] [symbol] | |
| | [symbol] ERVQPLEENVGNAARPRFERNKRVKFSRSADAPAYQQGQNQLYNELNLG | |
| | RREEYDVLDKRRGRDPEMGGKPRRKNPQEGLYNELQKDKMAEAYSEIGMKG | |
| | ERRRGKGHDGLYQGLSTATKDTYDALHMQALPPR | |
| CAT-CD 70-324 | MALPVTALLLPLALLLHAARPQVQLVQSGAEVKKPGASVKVSCKASGYTFT | 2811 |
| CD8α signal peptide, | NYGMNWVRQAPGQGLKWMGWINTYTGEPTYADAFKGRVTMTRDTSISTAYM | |
| CD70 scFv (1F6), | ELSRLRSDDTAVYYCARDYGDYGMDYWGQGTTVTVSSGGGGSGGGGSGGGG | |
| CD8α short hinge, | SGDIVMTQSPDSLAVSLGERATINCRASKSVSTSGYSFMHWYQQKPGQPPK | |
| CD8α transmembrane | LLIYLASNLESGVPDRFSGSGSGTDFTLTISSLQAEDVAVYYCQHSREVPW | |
| domain, [symbol] | TFGQGTKVEIKTTTPAPRPPTPAPTIASQPLSLRPEACRPAAGGAVHTRGL | |
| [symbol] CD3z | DFACDIYIWAPLAGTCGVLLLSLVITLYCNHRN [symbol] | |
| signaling domain | [symbol] [symbol] [symbol] | |
| | [symbol] [symbol] [symbol] | |
| | RVKFSRSADAPAYQQGQNQLYNELNLGRREEYDVLDKRRGRDPEMGGKPRR | |
| | KIVPQEGLYNELQKDKMAEAYSEIGMKGERRRGKGHDGLYQGLSTATKDTYD | |
| | ALHMQALPPR | |
| CAT-CD 70-325 | MALPVTALLLPLALLLHAARPQVQLVQSGAEVKKPGASVKVSCKASGYTFT | 2813 |
| CD8α signal peptide, | NYGMNWVRQAPGQGLKWMGWINTYTGEPTYADAFKGRVTMTRDTSISTAYM | |
| CD70 scFv (1F6), | ELSRLRSDDTAVYYCARDYGDYGMDYWGQGTTVTVSSGGGGSGGGGSGGGG | |
| IgG1 short hinge, CD8α | SGDIVMTQSPDSLAVSLGERATINCRASKSVSTSGYSFMHWYQQKPGQPPK | |
| transmembrane domain, | LLIYLASNLESGVPDRFSGSGSGTDFTLTISSLQAEDVAVYYCQHSREVPW | |
| [symbol] | TEGQGTKVEIKAEPKSPDKTHTCPPCPKDPIYIWAPLAGTCGVLLLSLVIT | |
| CD3z signaling domain | LYCNHRN [symbol] [symbol] | |
| | [symbol] [symbol] [symbol] | |
| | [symbol] RVKFSRSADAPAYQQGQNQLYNELNL | |
| | GRREEYDVLDKRRGRDPEMGGKPRRKNPQEGLYNELQKDKMAEAYSEIGMK | |
| | GERRRGKGHDGLYQGLSTATKDTYDALHMQALPPR | |
| CAT-CD70-326 | MALPVTALLLPLALLLHAARPQVQLVQSGAEVKKPGASVKVSCKASGYTFT | 2815 |
| CD8α signal peptide, | NYGMNWVRQAPGQGLKWMGWINTYTGEPTYADAFKGRVTMTRDTSISTAYM | |
| CD70 scFv (1F6), | ELSRLRSDDTAVYYCARDYGDYGMDYWGQGTTVTVSSGGGGSGGGGSGGGG | |
| IgG4 short hinge, CD8α | SGDIVMTQSPDSLAVSLGERATINCRASKSVSTSGYSFMHWYQQKPGQPPK | |
| transmembrane domain, | LLIYLASNLESGVPDRFSGSGSGTDFTLTISSLQAEDVAVYYCQHSREVPW | |
| [symbol] | TFGQGTKVEIKESKYGPPCPSCPIYIWAPLAGTCGVLLLSLVITLYCNHRN | |
| CD3z signaling domain | [symbol] [symbol] [symbol] | |
| | [symbol] [symbol] [symbol] | |
| | [symbol] RVKFSRSADAPAYQQGQNQLYNELNLGRREEYD | |
| | VLDKRRGRDPEMGGKPRRKNPQEGLYNELQKDKMAEAYSEIGMKGERRRGK | |
| | GHDGLYQGLSTATKDTYDALHMQALPPR | |
| CAT-CD70-327 | MALPVTALLLPLALLLHAARPQVQLVQSGAEVKKPGASVKVSCKASGYTFT | 2817 |
| CD8α signal peptide, | NYGMNWVRQAPGQGLKWMGWINTYTGEPTYADAFKGRVTMTRDTSISTAYM | |
| CD70 scFv (1F6), | ELSRLRSDDTAVYYCARDYGDYGMDYWGQGTTVTVSSGGGGSGGGGSGGGG | |
| IgG4 hinge-CH3, CD8α | SGDIVMTQSPDSLAVSLGERATINCRASKSVSTSGYSFMHWYQQKPGQPPK | |
| transmembrane domain, | LLIYLASNLESGVPDRFSGSGSGTDFTLTISSLQAEDVAVYYCQHSREVPW | |
| [symbol] | TEGQGTKVEIKESKYGPPCPSCPGQPREPQVYTLPPSQEEMTKNQVSLTCL | |
| CD3z signaling domain | VKGFYPSDIAVEWESNGQPENNYKTTPPVLDSDGSFFLYSRLTVDKSRWQE | |
| | GNVFSCSVMHEALHNHYTQKSLSLSLGKIYIWAPLAGTCGVLLLSLVITLY | |
| | CNHRN [symbol] [symbol] | |
| | [symbol] [symbol] [symbol] | |
| | [symbol] RVKFSRSADAPAYQQGQNQLYNELNLGR | |
| | REEYDVLDKRRGRDPEMGGKPRRKNPQEGLYNELQKDKMAEAYSEIGMKGE | |
| | RRRGKGHDGLYQGLSTATKDTYDALHMQALPPR | |
| CAT-CD70-328 | MALPVTALLLPLALLLHAARPQVQLVQSGAEVKKPGASVKVSCKASGYTFT | 2819 |
| CD8α signal peptide, | NYGMNWVRQAPGQGLKWMGWINTYTGEPTYADAFKGRVTMTRDTSISTAYM | |
| CD70 scFv (1F6), | ELSRLRSDDTAVYYCARDYGDYGMDYWGQGTTVTVSSGGGGSGGGGSGGGG | |
| IgG4 hinge-CH2-CH3, | SGDIVMTQSPDSLAVSLGERATINCRASKSVSTSGYSFMHWYQQKPGQPPK | |
| CD8α transmembrane | LLIYLASNLESGVPDRFSGSGSGTDFTLTISSLQAEDVAVYYCQHSREVPW | |
| domain, [symbol] | TFGQGTKVEIKESKYGPPCPSCPAPEFLGGPSVFLFPPKPKDTLMISRTPE | |
| CD3z | VTCVVVDVSQEDPEVQFNWYVDGVEVHNAKTKPREEQFNSTYRVVSVLTVL | |
| signaling domain | HQDWLNGKEYKCKVSNKGLPSSIEKTISKAKGQPREPQVYTLPPSQEEMTK | |
| | NQVSLTCLVKGFYPSDIAVEWESNGQPENNYKTTPPVLDSDGSFFLYSRLT | |
| | VDKSRWQEGNVFSCSVMHEALHNHYTQKSLSLSLGKIYIWAPLAGTCGVLL | |
| | LSLVITLYCNHRN [symbol] [symbol] | |
| | [symbol] [symbol] [symbol] | |
| | [symbol] [symbol] RVKFSRSADAPAYQQGQNQL | |
| | YNELNLGRREEYDVLDKRRGRDPEMGGKPRRKNPQEGLYNELQKDKMAEAY | |
| | SEIGMKGERRRGKGHDGLYQGLSTATKDTYDALHMQALPPR | |
| CAT-CD70-329 | MALPVTALLLPLALLLHAARPQVQLVQSGAEVKKPGASVKVSCKASGYTFT | 2821 |
| CD8α signal peptide, | NYGMNWVRQAPGQGLKWMGWINTYTGEPTYADAFKGRVTMTRDTSISTAYM | |
| CD70 scFv (1F6), | ELSRLRSDDTAVYYCARDYGDYGMDYWGQGTTVTVSSGGGGSGGGGSGGGG | |
| IgG4 mutant hinge, | SGDIVMTQSPDSLAVSLGERATINCRASKSVSTSGYSFMHWYQQKPGQPPK | |
| CD8α transmembrane | LLIYLASNLESGVPDRFSGSGSGTDFTLTISSLQAEDVAVYYCQHSREVPW | |
| domain, [symbol] | TFGQGTKVEIKESKYGPPCPSCPAPEFEGGPSVFLFPPKPKDTLMISRTPE | |
| CD3z | VTCVVVDVSQEDPEVQFNWYVDGVEVHNAKTKPREEQFQSTYRVVSVLTVL | |
| signaling domain | HQDWLNGKEYKCKVSNKGLPSSIEKTISKAKGQPREPQVYTLPPSQEEMTK | |
| | NQVSLTCLVKGFYPSDIAVEWESNGQPENNYKTTPPVLDSDGSFFLYSRLT | |
| | VDKSRWQEGNVFSCSVMHEALHNHYTQKSLSLSLGKIYIWAPLAGTCGVLL | |
| | LSLVITLYCNHRN [symbol] [symbol] | |
| | [symbol] [symbol] [symbol] | |
| | [symbol] [symbol] RVKFSRSADAPAYQQGQNQL | |
| | YNELNLGRREEYDVLDKRRGRDPEMGGKPRRKNPQEGLYNELQKDKMAEAY | |
| | SEIGMKGERRRGKGHDGLYQGLSTATKDTYDALHMQALPPR | |
| CAT-CD70-330 | MALPVTALLLPLALLLHAARPQVQLVQSGAEVKKPGASVKVSCKASGYTFT | 2823 |
| CD8α signal peptide, | NYGMNWVRQAPGQGLKWMGWINTYTGEPTYADAFKGRVTMTRDTSISTAYM | |
| CD70 scFv (1F6), | ELSRLRSDDTAVYYCARDYGDYGMDYWGQGTTVTVSSGGGGSGGGGSGGGG | |
| CD8α short hinge, | SGDIVMTQSPDSLAVSLGERATINCRASKSVSTSGYSFMHWYQQKPGQPPK | |
| CD8α transmembrane | LLIYLASNLESGVPDRFSGSGSGTDFTLTISSLQAEDVAVYYCQHSREVPW | |
| domain, [symbol] | TFGQGTKVEIKTTTPAPRPPTPAPTIASQPLSLRPEACRPAAGGAVHTRGL | |
| [symbol] | DFACDIYIWAPLAGTCGVLLLSLVITLYCNHRN [symbol] | |
| CD3z signaling domain | [symbol] [symbol] RVKFSRSADAPAYQQGQ | |
| | NQLYNELNLGRREEYDVLDKRRGRDPEMGGKPRRKNPQEGLYNELQKDKMA | |
| | EAYSEIGMKGERRRGKGHDGLYQGLSTATKDTYDALHMQALPPR | |
| CAT-CD70-331 | MALPVTALLLPLALLLHAARPQVQLVQSGAEVKKPGASVKVSCKASGYTFT | 2825 |
| CD8α signal peptide, | NYGMNWVRQAPGQGLKWMGWINTYTGEPTYADAFKGRVTMTRDTSISTAYM | |
| CD70 scFv (1F6), | ELSRLRSDDTAVYYCARDYGDYGMDYWGQGTTVTVSSGGGGSGGGGSGGGG | |
| IgG1 short hinge, CD8α | SGDIVMTQSPDSLAVSLGERATINCRASKSVSTSGYSFMHWYQQKPGQPPK | |
| transmembrane domain, | LLIYLASNLESGVPDRFSGSGSGTDFTLTISSLQAEDVAVYYCQHSREVPW | |
| [symbol] | TEGQGTKVEIKAEPKSPDKTHTCPPCPKDPIYIWAPLAGTCGVLLLSLVIT | |
| [symbol] CD3z | LYCNHRN [symbol] [symbol] | |
| signaling domain | [symbol] RVKFSRSADAPAYQQGQNQLYNELNLGRREEYDVLDKRRGRDP | |
| | EMGGKPRRKNPQEGLYNELQKDKMAEAYSEIGMKGERRRGKGHDGLYQGLS | |
| | TATKDTYDALHMQALPPR | |
| CAT-CD70-3 3 2 | MALPVTALLLPLALLLHAARPQVQLVQSGAEVKKPGASVKVSCKASGYTFT | 2827 |
| CD8α signal peptide, | NYGMNWVRQAPGQGLKWMGWINTYTGEPTYADAFKGRVTMTRDTSISTAYM | |
| CD70 scFv (1F6), | ELSRLRSDDTAVYYCARDYGDYGMDYWGQGTTVTVSSGGGGSGGGGSGGGG | |
| IgG4 short hinge, CD8α | SGDIVMTQSPDSLAVSLGERATINCRASKSVSTSGYSFMHWYQQKPGQPPK | |
| transmembrane domain, | LLIYLASNLESGVPDRFSGSGSGTDFTLTISSLQAEDVAVYYCQHSREVPW | |
| [symbol] | TFGQGTKVEIKESKYGPPCPSCPIYIWAPLAGTCGVLLLSLVITLYCNHRN | |
| [symbol] CD3z | [symbol] [symbol] [symbol] | |
| signaling domain | [symbol] RVKFSRSADAPAYQQGQNQLYNELNLGRREEYDVLDKRRGRDPEMGGKPR | |
| | RKNPQEGLYNELQKDKMAEAYSEIGMKGERRRGKGHDGLYQGLSTATKDTY | |
| | DALHMQALPPR | |
| CAT-CD70-333 | MALPVTALLLPLALLLHAARPQVQLVQSGAEVKKPGASVKVSCKASGYTFT | 2829 |
| CD8α signal peptide, | NYGMNWVRQAPGQGLKWMGWINTYTGEPTYADAFKGRVTMTRDTSISTAYM | |
| CD70 scFv (1F6), | ELSRLRSDDTAVYYCARDYGDYGMDYWGQGTTVTVSSGGGGSGGGGSGGGG | |
| IgG4 hinge-CH3, CD8α | SGDIVMTQSPDSLAVSLGERATINCRASKSVSTSGYSFMHWYQQKPGQPPK | |
| transmembrane domain, | LLIYLASNLESGVPDRFSGSGSGTDFTLTISSLQAEDVAVYYCQHSREVPW | |
| [symbol] | TEGQGTKVEIKESKYGPPCPSCPGQPREPQVYTLPPSQEEMTKNQVSLTCL | |
| [symbol] CD3z | VKGFYPSDIAVEWESNGQPENNYKTTPPVLDSDGSFFLYSRLTVDKSRWQE | |
| signaling domain | GNVFSCSVMHEALHNHYTQKSLSLSLGKIYIWAPLAGTCGVLLLSLVITLY | |
| | CNHRN [symbol] [symbol] [symbol] | |
| | [symbol] RVKFSRSADAPAYQQGQNQLYNELNLGRREEYDVLDKRRGRDPEM | |
| | GGKPRRKNPQEGLYNELQKDKMAEAYSEIGMKGERRRGKGHDGLYQGLSTA | |
| | TKDTYDALHMQALPPR | |
| CAT-CD70-334 | MALPVTALLLPLALLLHAARPQVQLVQSGAEVKKPGASVKVSCKASGYTFT | 2831 |
| CD8α signal peptide, | NYGMNWVRQAPGQGLKWMGWINTYTGEPTYADAFKGRVTMTRDTSISTAYM | |
| CD70 scFv (1F6), | ELSRLRSDDTAVYYCARDYGDYGMDYWGQGTTVTVSSGGGGSGGGGSGGGG | |
| IgG4 hinge-CH2-CH3, | SGDIVMTQSPDSLAVSLGERATINCRASKSVSTSGYSFMHWYQQKPGQPPK | |
| CD8α transmembrane | LLIYLASNLESGVPDRFSGSGSGTDFTLTISSLQAEDVAVYYCQHSREVPW | |
| domain, [symbol] | TFGQGTKVEIKESKYGPPCPSCPAPEFLGGPSVFLFPPKPKDTLMISRTPE | |
| [symbol] | VTCVVVDVSQEDPEVQFNWYVDGVEVHNAKTKPREEQFNSTYRVVSVLTVL | |
| CD3z signaling domain | HQDWLNGKEYKCKVSNKGLPSSIEKTISKAKGQPREPQVYTLPPSQEEMTK | |
| | NQVSLTCLVKGFYPSDIAVEWESNGQPENNYKTTPPVLDSDGSFFLYSRLT | |
| | VDKSRWQEGNVFSCSVMHEALHNHYTQKSLSLSLGKIYIWAPLAGTCGVLL | |
| | LSLVITLYCNHRN [symbol] [symbol] | |
| | [symbol] RVKFSRSADAPAYQQGQNQLYNELNLGRREEYDVLDK | |
| | RRGRDPEMGGKPRRKNPQEGLYNELQKDKMAEAYSEIGMKGERRRGKGHDG | |
| | LYQGLSTATKDTYDALHMQALPPR | |
| CAT-CD70-335 | MALPVTALLLPLALLLHAARPQVQLVQSGAEVKKPGASVKVSCKASGYTFT | 2833 |
| CD8α signal peptide, | NYGMNWVRQAPGQGLKWMGWINTYTGEPTYADAFKGRVTMTRDTSISTAYM | |
| CD70 scFv (1F6), | ELSRLRSDDTAVYYCARDYGDYGMDYWGQGTTVTVSSGGGGSGGGGSGGGG | |
| IgG4 mutant hinge, | SGDIVMTQSPDSLAVSLGERATINCRASKSVSTSGYSFMHWYQQKPGQPPK | |
| CD8α transmembrane | LLIYLASNLESGVPDRFSGSGSGTDFTLTISSLQAEDVAVYYCQHSREVPW | |
| domain, [symbol] | TFGQGTKVEIKESKYGPPCPSCPAPEFEGGPSVFLFPPKPKDTLMISRTPE | |
| [symbol] | VTCVVVDVSQEDPEVQFNWYVDGVEVHNAKTKPREEQFQSTYRVVSVLTVL | |
| CD3z signaling domain | HQDWLNGKEYKCKVSNKGLPSSIEKTISKAKGQPREPQVYTLPPSQEEMTK | |
| | NQVSLTCLVKGFYPSDIAVEWESNGQPENNYKTTPPVLDSDGSFFLYSRLT | |
| | VDKSRWQEGNVFSCSVMHEALHNHYTQKSLSLSLGKIYIWAPLAGTCGVLL | |
| | LSLVITLYCNHRN [symbol] [symbol] | |
| | [symbol] RVKFSRSADAPAYQQGQNQLYNELNLGRREEYDVLDK | |
| | RRGRDPEMGGKPRRKNPQEGLYNELQKDKMAEAYSEIGMKGERRRGKGHDG | |
| | LYQGLSTATKDTYDALHMQALPPR | |
| CAT-CD70-336 | MALPVTALLLPLALLLHAARPQVQLVQSGAEVKKPGASVKVSCKASGYTFT | 2835 |
| CD8α signal peptide, | NYGMNWVRQAPGQGLKWMGWINTYTGEPTYADAFKGRVTMTRDTSISTAYM | |
| CD70 scFv (1F6), | ELSRLRSDDTAVYYCARDYGDYGMDYWGQGTTVTVSSGGGGSGGGGSGGGG | |
| CD8α short hinge, | SGDIVMTQSPDSLAVSLGERATINCRASKSVSTSGYSFMHWYQQKPGQPPK | |
| CD8α transmembrane | LLIYLASNLESGVPDRFSGSGSGTDFTLTISSLQAEDVAVYYCQHSREVPW | |
| domain, CD3z | TFGQGTKVEIKTTTPAPRPPTPAPTIASQPLSLRPEACRPAAGGAVHTRGL | |
| signaling domain | DFACDIYIWAPLAGTCGVLLLSLVITLYCNHRNRVKFSRSADAPAYQQGQN | |
| | QLYNELNLGRREEYDVLDKRRGRDPEMGGKPRRKNPQEGLYNELQKDKMAE | |
| | AYSEIGMKGERRRGKGHDGLYQGLSTATKDTYDALHMQALPPR | |
| CAT-CD70-337 | MALPVTALLLPLALLLHAARPQVQLVQSGAEVKKPGASVKVSCKASGYTFT | 2837 |
| CD8α signal peptide, | NYGMNWVRQAPGQGLKWMGWINTYTGEPTYADAFKGRVTMTRDTSISTAYM | |
| CD70 scFv (1F6), | ELSRLRSDDTAVYYCARDYGDYGMDYWGQGTTVTVSSGGGGSGGGGSGGGG | |
| IgG1 short hinge, CD8α | SGDIVMTQSPDSLAVSLGERATINCRASKSVSTSGYSFMHWYQQKPGQPPK | |
| transmembrane domain, | LLIYLASNLESGVPDRFSGSGSGTDFTLTISSLQAEDVAVYYCQHSREVPW | |
| CD3z signaling domain | TEGQGTKVEIKAEPKSPDKTHTCPPCPKDPIYIWAPLAGTCGVLLLSLVIT | |
| | LYCNHRNRVKFSRSADAPAYQQGQNQLYNELNLGRREEYDVLDKRRGRDPE | |
| | MGGKPRRKNPQEGLYNELQKDKMAEAYSEIGMKGERRRGKGHDGLYQGLST | |
| | ATKDTYDALHMQALPPR | |
| CAT-CD70-338 | MALPVTALLLPLALLLHAARPQVQLVQSGAEVKKPGASVKVSCKASGYTFT | 2839 |
| CD8α signal peptide, | NYGMNWVRQAPGQGLKWMGWINTYTGEPTYADAFKGRVTMTRDTSISTAYM | |
| CD70 scFv (1F6), | ELSRLRSDDTAVYYCARDYGDYGMDYWGQGTTVTVSSGGGGSGGGGSGGGG | |
| IgG4 short hinge, CD8α | SGDIVMTQSPDSLAVSLGERATINCRASKSVSTSGYSFMHWYQQKPGQPPK | |
| transmembrane domain, | LLIYLASNLESGVPDRFSGSGSGTDFTLTISSLQAEDVAVYYCQHSREVPW | |
| CD3z signaling domain | TFGQGTKVEIKESKYGPPCPSCPIYIWAPLAGTCGVLLLSLVITLYCNHRN | |
| | RVKFSRSADAPAYQQGQNQLYNELNLGRREEYDVLDKRRGRDPEMGGKPRR | |
| | KIVPQEGLYNELQKDKMAEAYSEIGMKGERRRGKGHDGLYQGLSTATKDTYD | |
| | ALHMQALPPR | |
| CAT-CD70-339 | MALPVTALLLPLALLLHAARPQVQLVQSGAEVKKPGASVKVSCKASGYTFT | 2841 |
| CD8α signal peptide, | NYGMNWVRQAPGQGLKWMGWINTYTGEPTYADAFKGRVTMTRDTSISTAYM | |
| CD70 scFv (1F6), | ELSRLRSDDTAVYYCARDYGDYGMDYWGQGTTVTVSSGGGGSGGGGSGGGG | |
| IgG4 hinge-CH3, CD8α | SGDIVMTQSPDSLAVSLGERATINCRASKSVSTSGYSFMHWYQQKPGQPPK | |
| transmembrane domain, | LLIYLASNLESGVPDRFSGSGSGTDFTLTISSLQAEDVAVYYCQHSREVPW | |
| CD3z signaling domain | TEGQGTKVEIKESKYGPPCPSCPGQPREPQVYTLPPSQEEMTKNQVSLTCL | |
| | VKGFYPSDIAVEWESNGQPENNYKTTPPVLDSDGSFFLYSRLTVDKSRWQE | |
| | GNVFSCSVMHEALHNHYTQKSLSLSLGKIYIWAPLAGTCGVLLLSLVITLY | |
| | CNHRNRVKFSRSADAPAYQQGQNQLYNELNLGRREEYDVLDKRRGRDPEMG | |
| | GKPRRKNPQEGLYNELQKDKMAEAYSEIGMKGERRRGKGHDGLYQGLSTAT | |
| | KDTYDALHMQALPPR | |
| CAT-CD70-340 | MALPVTALLLPLALLLHAARPQVQLVQSGAEVKKPGASVKVSCKASGYTFT | 2843 |
| CD8α signal peptide, | NYGMNWVRQAPGQGLKWMGWINTYTGEPTYADAFKGRVTMTRDTSISTAYM | |
| CD70 scFv (1F6), | ELSRLRSDDTAVYYCARDYGDYGMDYWGQGTTVTVSSGGGGSGGGGSGGGG | |
| IgG4 hinge-CH2-CH3, | SGDIVMTQSPDSLAVSLGERATINCRASKSVSTSGYSFMHWYQQKPGQPPK | |
| CD8α transmembrane | LLIYLASNLESGVPDRFSGSGSGTDFTLTISSLQAEDVAVYYCQHSREVPW | |
| domain, CD3z | TFGQGTKVEIKESKYGPPCPSCPAPEFLGGPSVFLFPPKPKDTLMISRTPE | |
| signaling domain | VTCVVVDVSQEDPEVQFNWYVDGVEVHNAKTKPREEQFNSTYRVVSVLTVL | |
| | HQDWLNGKEYKCKVSNKGLPSSIEKTISKAKGQPREPQVYTLPPSQEEMTK | |
| | NQVSLTCLVKGFYPSDIAVEWESNGQPENNYKTTPPVLDSDGSFFLYSRLT | |
| | VDKSRWQEGNVFSCSVMHEALHNHYTQKSLSLSLGKIYIWAPLAGTCGVLL | |
| | LSLVITLYCNHRNRVKFSRSADAPAYQQGQNQLYNELNLGRREEYDVLDKR | |
| | RGRDPEMGGKPRRKNPQEGLYNELQKDKMAEAYSEIGMKGERRRGKGHDGL | |
| | YQGLSTATKDTYDALHMQALPPR | |
| CAT-CD70-341 | MALPVTALLLPLALLLHAARPQVQLVQSGAEVKKPGASVKVSCKASGYTFT | 2845 |
| CD8α signal peptide, | NYGMNWVRQAPGQGLKWMGWINTYTGEPTYADAFKGRVTMTRDTSISTAYM | |
| CD70 scFv (1F6), | ELSRLRSDDTAVYYCARDYGDYGMDYWGQGTTVTVSSGGGGSGGGGSGGGG | |
| IgG4 mutant hinge, | SGDIVMTQSPDSLAVSLGERATINCRASKSVSTSGYSFMHWYQQKPGQPPK | |
| CD8α transmembrane | LLIYLASNLESGVPDRFSGSGSGTDFTLTISSLQAEDVAVYYCQHSREVPW | |
| domain, CD3z | TFGQGTKVEIKESKYGPPCPSCPAPEFEGGPSVFLFPPKPKDTLMISRTPE | |
| signaling domain | VTCVVVDVSQEDPEVQFNWYVDGVEVHNAKTKPREEQFQSTYRVVSVLTVL | |
| | HQDWLNGKEYKCKVSNKGLPSSIEKTISKAKGQPREPQVYTLPPSQEEMTK | |
| | NQVSLTCLVKGFYPSDIAVEWESNGQPENNYKTTPPVLDSDGSFFLYSRLT | |
| | VDKSRWQEGNVFSCSVMHEALHNHYTQKSLSLSLGKIYIWAPLAGTCGVLL | |
| | LSLVITLYCNHRNRVKFSRSADAPAYQQGQNQLYNELNLGRREEYDVLDKR | |
| | RGRDPEMGGKPRRKNPQEGLYNELQKDKMAEAYSEIGMKGERRRGKGHDGL | |
| | YQGLSTATKDTYDALHMQALPPR | |
| CAT-CD70-342 | MALPVTALLLPLALLLHAARPQVQLVQSGAEVKKPGASVKVSCKASGYTFT | 2847 |
| CD8α signal peptide, | NYGMNWVRQAPGQGLKWMGWINTYTGEPTYADAFKGRVTMTRDTSISTAYM | |
| CD70 scFv (1F6), | ELSRLRSDDTAVYYCARDYGDYGMDYWGQGTTVTVSSGGGGSGGGGSGGGG | |
| CD8α short hinge, | SGDIVMTQSPDSLAVSLGERATINCRASKSVSTSGYSFMHWYQQKPGQPPK | |
| CD8α transmembrane | LLIYLASNLESGVPDRFSGSGSGTDFTLTISSLQAEDVAVYYCQHSREVPW | |
| domain, [symbol] | TFGQGTKVEIKTTTPAPRPPTPAPTIASQPLSLRPEACRPAAGGAVHTRGL | |
| [symbol] | DFACDIYIWAPLAGTCGVLLLSLVITLYCNHRN [symbol] | |
| DAP12 signaling | [symbol] YFLGRLVPRGRGAAEAATRKQRITET | |
| domain | ESPYQELQGQRSDVYSDLNTQRPYYK | |
| CAT-CD70-343 | MALPVTALLLPLALLLHAARPQVQLVQSGAEVKKPGASVKVSCKASGYTFT | 2849 |
| CD8α signal peptide, | NYGMNWVRQAPGQGLKWMGWINTYTGEPTYADAFKGRVTMTRDTSISTAYM | |
| CD70 scFv (1F6), | ELSRLRSDDTAVYYCARDYGDYGMDYWGQGTTVTVSSGGGGSGGGGSGGGG | |
| IgG1 short hinge, CD8α | SGDIVMTQSPDSLAVSLGERATINCRASKSVSTSGYSFMHWYQQKPGQPPK | |
| transmembrane domain, | LLIYLASNLESGVPDRFSGSGSGTDFTLTISSLQAEDVAVYYCQHSREVPW | |
| [symbol] | TEGQGTKVEIKAEPKSPDKTHTCPPCPKDPIYIWAPLAGTCGVLLLSLVIT | |
| [symbol] DAP12 | LYCNHRN [symbol] [symbol] Y | |
| signaling domain | FLGRLVPRGRGAAEAATRKQRITETESPYQELQGQRSDVYSDLNTQRPYYK | |
| CAT-CD70-344 | MALPVTALLLPLALLLHAARPQVQLVQSGAEVKKPGASVKVSCKASGYTFT | 2851 |
| CD8α signal peptide, | NYGMNWVRQAPGQGLKWMGWINTYTGEPTYADAFKGRVTMTRDTSISTAYM | |
| CD70 scFv (1F6), | ELSRLRSDDTAVYYCARDYGDYGMDYWGQGTTVTVSSGGGGSGGGGSGGGG | |
| IgG4 short hinge, CD8α | SGDIVMTQSPDSLAVSLGERATINCRASKSVSTSGYSFMHWYQQKPGQPPK | |
| transmembrane domain, | LLIYLASNLESGVPDRFSGSGSGTDFTLTISSLQAEDVAVYYCQHSREVPW | |
| [symbol] | TFGQGTKVEIKESKYGPPCPSCPIYIWAPLAGTCGVLLLSLVITLYCNHRN | |
| [symbol] DAP12 | [symbol] [symbol] YFLGRLVP | |
| signaling domain | RGRGAAEAATRKQRITETESPYQELQGQRSDVYSDLNTQRPYYK | |
| CAT-CD70-345 | MALPVTALLLPLALLLHAARPQVQLVQSGAEVKKPGASVKVSCKASGYTFT | 2853 |
| CD8α signal peptide, | NYGMNWVRQAPGQGLKWMGWINTYTGEPTYADAFKGRVTMTRDTSISTAYM | |
| CD70 scFv (1F6), | ELSRLRSDDTAVYYCARDYGDYGMDYWGQGTTVTVSSGGGGSGGGGSGGGG | |
| IgG4 hinge-CH3, CD8α | SGDIVMTQSPDSLAVSLGERATINCRASKSVSTSGYSFMHWYQQKPGQPPK | |
| transmembrane domain, | LLIYLASNLESGVPDRFSGSGSGTDFTLTISSLQAEDVAVYYCQHSREVPW | |
| [symbol] | TEGQGTKVEIKESKYGPPCPSCPGQPREPQVYTLPPSQEEMTKNQVSLTCL | |
| [symbol] DAP12 | VKGFYPSDIAVEWESNGQPENNYKTTPPVLDSDGSFFLYSRLTVDKSRWQE | |
| signaling domain | GNVFSCSVMHEALHNHYTQKSLSLSLGKIYIWAPLAGTCGVLLLSLVITLY | |
| | CNHRN [symbol] [symbol] YFL | |
| | GRLVPRGRGAAEAATRKQRITETESPYQELQGQRSDVYSDLNTQRPYYK | |
| CAT-CD70-346 | MALPVTALLLPLALLLHAARPQVQLVQSGAEVKKPGASVKVSCKASGYTFT | 2855 |
| CD8α signal peptide, | NYGMNWVRQAPGQGLKWMGWINTYTGEPTYADAFKGRVTMTRDTSISTAYM | |
| CD70 scFv (1F6), | ELSRLRSDDTAVYYCARDYGDYGMDYWGQGTTVTVSSGGGGSGGGGSGGGG | |
| IgG4 hinge-CH2-CH3, | SGDIVMTQSPDSLAVSLGERATINCRASKSVSTSGYSFMHWYQQKPGQPPK | |
| CD8α transmembrane | LLIYLASNLESGVPDRFSGSGSGTDFTLTISSLQAEDVAVYYCQHSREVPW | |
| domain, [symbol] | TFGQGTKVEIKESKYGPPCPSCPAPEFLGGPSVFLFPPKPKDTLMISRTPE | |
| [symbol] | VTCVVVDVSQEDPEVQFNWYVDGVEVHNAKTKPREEQFNSTYRVVSVLTVL | |
| DAP12 signaling | HQDWLNGKEYKCKVSNKGLPSSIEKTISKAKGQPREPQVYTLPPSQEEMTK | |
| domain | NQVSLTCLVKGFYPSDIAVEWESNGQPENNYKTTPPVLDSDGSFFLYSRLT | |
| | VDKSRWQEGNVFSCSVMHEALHNHYTQKSLSLSLGKIYIWAPLAGTCGVLL | |
| | LSLVITLYCNHRN [symbol] [symbol] | |
| | [symbol] YFLGRLVPRGRGAAEAATRKQRITETESPYQELQGQRSDVYSDLNT | |
| | QRPYYK | |
| CAT-CD70-347 | MALPVTALLLPLALLLHAARPQVQLVQSGAEVKKPGASVKVSCKASGYTFT | 2857 |
| CD8α signal peptide, | NYGMNWVRQAPGQGLKWMGWINTYTGEPTYADAFKGRVTMTRDTSISTAYM | |
| CD70 scFv (1F6), | ELSRLRSDDTAVYYCARDYGDYGMDYWGQGTTVTVSSGGGGSGGGGSGGGG | |
| IgG4 mutant hinge, | SGDIVMTQSPDSLAVSLGERATINCRASKSVSTSGYSFMHWYQQKPGQPPK | |
| CD8α transmembrane | LLIYLASNLESGVPDRFSGSGSGTDFTLTISSLQAEDVAVYYCQHSREVPW | |
| domain, [symbol] | TFGQGTKVEIKESKYGPPCPSCPAPEFEGGPSVFLFPPKPKDTLMISRTPE | |
| [symbol] | VTCVVVDVSQEDPEVQFNWYVDGVEVHNAKTKPREEQFQSTYRVVSVLTVL | |
| DAP12 signaling | HQDWLNGKEYKCKVSNKGLPSSIEKTISKAKGQPREPQVYTLPPSQEEMTK | |
| domain | NQVSLTCLVKGFYPSDIAVEWESNGQPENNYKTTPPVLDSDGSFFLYSRLT | |
| | VDKSRWQEGNVFSCSVMHEALHNHYTQKSLSLSLGKIYIWAPLAGTCGVLL | |
| | LSLVITLYCNHRN [symbol] [symbol] | |
| | [symbol] YFLGRLVPRGRGAAEAATRKQRITETESPYQELQGQRSDVYSDLNT | |
| | QRPYYK | |
| CAT-CD70-348 | MALPVTALLLPLALLLHAARPQVQLVQSGAEVKKPGASVKVSCKASGYTFT | 2859 |
| CD8α signal peptide, | NYGMNWVRQAPGQGLKWMGWINTYTGEPTYADAFKGRVTMTRDTSISTAYM | |
| CD70 scFv (1F6), | ELSRLRSDDTAVYYCARDYGDYGMDYWGQGTTVTVSSGGGGSGGGGSGGGG | |
| CD8α short hinge, | SGDIVMTQSPDSLAVSLGERATINCRASKSVSTSGYSFMHWYQQKPGQPPK | |
| CD8α transmembrane | LLIYLASNLESGVPDRFSGSGSGTDFTLTISSLQAEDVAVYYCQHSREVPW | |
| domain, [symbol] | TFGQGTKVEIKTTTPAPRPPTPAPTIASQPLSLRPEACRPAAGGAVHTRGL | |
| [symbol] | DFACDIYIWAPLAGTCGVLLLSLVITLYCNHRN [symbol] | |
| DAP12 signaling | [symbol] [symbol] YFLGRLVPRGRGAAEAATRKQRITETE | |
| domain | SPYQELQGQRSDVYSDLNTQRPYYK | |
| CAT-CD70-349 | MALPVTALLLPLALLLHAARPQVQLVQSGAEVKKPGASVKVSCKASGYTFT | 2861 |
| CD8α signal peptide, | NYGMNWVRQAPGQGLKWMGWINTYTGEPTYADAFKGRVTMTRDTSISTAYM | |
| CD70 scFv (1F6), | ELSRLRSDDTAVYYCARDYGDYGMDYWGQGTTVTVSSGGGGSGGGGSGGGG | |
| IgG1 short hinge, CD8α | SGDIVMTQSPDSLAVSLGERATINCRASKSVSTSGYSFMHWYQQKPGQPPK | |
| transmembrane domain, | LLIYLASNLESGVPDRFSGSGSGTDFTLTISSLQAEDVAVYYCQHSREVPW | |
| [symbol] | TEGQGTKVEIKAEPKSPDKTHTCPPCPKDPIYIWAPLAGTCGVLLLSLVIT | |
| [symbol] DAP12 | LYCNHRN [symbol] [symbol] YF | |
| signaling domain | LGRLVPRGRGAAEAATRKQRITETESPYQELQGQRSDVYSDLNTQRPYYK | |
| CAT-CD70-350 | MALPVTALLLPLALLLHAARPQVQLVQSGAEVKKPGASVKVSCKASGYTFT | 2863 |
| CD8α signal peptide, | NYGMNWVRQAPGQGLKWMGWINTYTGEPTYADAFKGRVTMTRDTSISTAYM | |
| CD70 scFv (1F6), | ELSRLRSDDTAVYYCARDYGDYGMDYWGQGTTVTVSSGGGGSGGGGSGGGG | |
| IgG4 short hinge, CD8α | SGDIVMTQSPDSLAVSLGERATINCRASKSVSTSGYSFMHWYQQKPGQPPK | |
| transmembrane domain, | LLIYLASNLESGVPDRFSGSGSGTDFTLTISSLQAEDVAVYYCQHSREVPW | |
| [symbol] | TFGQGTKVEIKESKYGPPCPSCPIYIWAPLAGTCGVLLLSLVITLYCNHRN | |
| [symbol] DAP12 | [symbol] [symbol] YFLGRLVPR | |
| signaling domain | GRGAAEAATRKQRITETESPYQELQGQRSDVYSDLNTQRPYYK | |
| CAT-CD70-351 | MALPVTALLLPLALLLHAARPQVQLVQSGAEVKKPGASVKVSCKASGYTFT | 2865 |
| CD8α signal peptide, | NYGMNWVRQAPGQGLKWMGWINTYTGEPTYADAFKGRVTMTRDTSISTAYM | |
| CD70 scFv (1F6), | ELSRLRSDDTAVYYCARDYGDYGMDYWGQGTTVTVSSGGGGSGGGGSGGGG | |
| IgG4 hinge-CH3, CD8α | SGDIVMTQSPDSLAVSLGERATINCRASKSVSTSGYSFMHWYQQKPGQPPK | |
| transmembrane domain, | LLIYLASNLESGVPDRFSGSGSGTDFTLTISSLQAEDVAVYYCQHSREVPW | |
| [symbol] | TEGQGTKVEIKESKYGPPCPSCPGQPREPQVYTLPPSQEEMTKNQVSLTCL | |
| [symbol] DAP12 | VKGFYPSDIAVEWESNGQPENNYKTTPPVLDSDGSFFLYSRLTVDKSRWQE | |
| signaling domain | GNVFSCSVMHEALHNHYTQKSLSLSLGKIYIWAPLAGTCGVLLLSLVITLY | |
| | CNHRN [symbol] [symbol] YFLG | |
| | RLVPRGRGAAEAATRKQRITETESPYQELQGQRSDVYSDLNTQRPYYK | |
| CAT-CD70-352 | MALPVTALLLPLALLLHAARPQVQLVQSGAEVKKPGASVKVSCKASGYTFT | 2867 |
| CD8α signal peptide, | NYGMNWVRQAPGQGLKWMGWINTYTGEPTYADAFKGRVTMTRDTSISTAYM | |
| CD70 scFv (1F6), | ELSRLRSDDTAVYYCARDYGDYGMDYWGQGTTVTVSSGGGGSGGGGSGGGG | |
| IgG4 hinge-CH2-CH3, | SGDIVMTQSPDSLAVSLGERATINCRASKSVSTSGYSFMHWYQQKPGQPPK | |
| CD8α transmembrane | LLIYLASNLESGVPDRFSGSGSGTDFTLTISSLQAEDVAVYYCQHSREVPW | |
| domain, [symbol] | TFGQGTKVEIKESKYGPPCPSCPAPEFLGGPSVFLFPPKPKDTLMISRTPE | |
| [symbol] | VTCVVVDVSQEDPEVQFNWYVDGVEVHNAKTKPREEQFNSTYRVVSVLTVL | |
| DAP12 signaling | HQDWLNGKEYKCKVSNKGLPSSIEKTISKAKGQPREPQVYTLPPSQEEMTK | |
| domain | NQVSLTCLVKGFYPSDIAVEWESNGQPENNYKTTPPVLDSDGSFFLYSRLT | |
| | VDKSRWQEGNVFSCSVMHEALHNHYTQKSLSLSLGKIYIWAPLAGTCGVLL | |
| | LSLVITLYCNHRN [symbol] [symbol] | |
| | [symbol] YFLGRLVPRGRGAAEAATRKQRITETESPYQELQGQRSDVYSDLNTQ | |
| | RPYYK | |
| CAT-CD70-353 | MALPVTALLLPLALLLHAARPQVQLVQSGAEVKKPGASVKVSCKASGYTFT | 2869 |
| CD8α signal peptide, | NYGMNWVRQAPGQGLKWMGWINTYTGEPTYADAFKGRVTMTRDTSISTAYM | |
| CD70 scFv (1F6), | ELSRLRSDDTAVYYCARDYGDYGMDYWGQGTTVTVSSGGGGSGGGGSGGGG | |
| IgG4 mutant hinge, | SGDIVMTQSPDSLAVSLGERATINCRASKSVSTSGYSFMHWYQQKPGQPPK | |
| CD8α transmembrane | LLIYLASNLESGVPDRFSGSGSGTDFTLTISSLQAEDVAVYYCQHSREVPW | |
| domain, [symbol] | TFGQGTKVEIKESKYGPPCPSCPAPEFEGGPSVFLFPPKPKDTLMISRTPE | |
| [symbol] | VTCVVVDVSQEDPEVQFNWYVDGVEVHNAKTKPREEQFQSTYRVVSVLTVL | |
| DAP12 signaling | HQDWLNGKEYKCKVSNKGLPSSIEKTISKAKGQPREPQVYTLPPSQEEMTK | |
| domain | NQVSLTCLVKGFYPSDIAVEWESNGQPENNYKTTPPVLDSDGSFFLYSRLT | |
| | VDKSRWQEGNVFSCSVMHEALHNHYTQKSLSLSLGKIYIWAPLAGTCGVLL | |
| | LSLVITLYCNHRN [symbol] [symbol] | |
| | [symbol] YFLGRLVPRGRGAAEAATRKQRITETESPYQELQGQRSDVYSDLNTQ | |
| | RPYYK | |
| CAT-CD70-354 | MALPVTALLLPLALLLHAARPQVQLVQSGAEVKKPGASVKVSCKASGYTFT | 2871 |
| CD8α signal peptide, | NYGMNWVRQAPGQGLKWMGWINTYTGEPTYADAFKGRVTMTRDTSISTAYM | |
| CD70 scFv (1F6), | ELSRLRSDDTAVYYCARDYGDYGMDYWGQGTTVTVSSGGGGSGGGGSGGGG | |
| CD8α short hinge, | SGDIVMTQSPDSLAVSLGERATINCRASKSVSTSGYSFMHWYQQKPGQPPK | |
| CD28 transmembrane | LLIYLASNLESGVPDRFSGSGSGTDFTLTISSLQAEDVAVYYCQHSREVPW | |
| domain, [symbol] | TFGQGTKVEIKTTTPAPRPPTPAPTIASQPLSLRPEACRPAAGGAVHTRGL | |
| [symbol] | DFACDFWVLVVVGGVLACYSLLVTVAFIIFWV [symbol] | |
| FCER1G signaling | [symbol] RLKIQVRKAAITSYEKSDGVYTGLSTRNQ | |
| domain | ETYETLKHEKPPQ | |
| CAT-CD70-355 | MALPVTALLLPLALLLHAARPQVQLVQSGAEVKKPGASVKVSCKASGYTFT | 2873 |
| CD8α signal peptide, | NYGMNWVRQAPGQGLKWMGWINTYTGEPTYADAFKGRVTMTRDTSISTAYM | |
| CD70 scFv (1F6), | ELSRLRSDDTAVYYCARDYGDYGMDYWGQGTTVTVSSGGGGSGGGGSGGGG | |
| IgG1 short hinge, CD28 | SGDIVMTQSPDSLAVSLGERATINCRASKSVSTSGYSFMHWYQQKPGQPPK | |
| transmembrane domain, | LLIYLASNLESGVPDRFSGSGSGTDFTLTISSLQAEDVAVYYCQHSREVPW | |
| [symbol] | TFGQGTKVEIKAEPKSPDKTHTCPPCPKDPFWVLVVVGGVLACYSLLVTVA | |
| [symbol] FCER1G | FIIFWV [symbol] [symbol] RLKI | |
| signaling domain | QVRKAAITSYEKSDGVYTGLSTRNQETYETLKHEKPPQ | |
| CAT-CD70-356 | MALPVTALLLPLALLLHAARPQVQLVQSGAEVKKPGASVKVSCKASGYTFT | 2875 |
| CD8α signal peptide, | NYGMNWVRQAPGQGLKWMGWINTYTGEPTYADAFKGRVTMTRDTSISTAYM | |
| CD70 scFv (1F6), | ELSRLRSDDTAVYYCARDYGDYGMDYWGQGTTVTVSSGGGGSGGGGSGGGG | |
| IgG4 short hinge, CD28 | SGDIVMTQSPDSLAVSLGERATINCRASKSVSTSGYSFMHWYQQKPGQPPK | |
| transmembrane domain, | LLIYLASNLESGVPDRFSGSGSGTDFTLTISSLQAEDVAVYYCQHSREVPW | |
| [symbol] | TFGQGTKVEIKESKYGPPCPSCPFWVLVVVGGVLACYSLLVTVAFIIFWV [symbol] | |
| [symbol] FCER1G | [symbol] [symbol] RLKIQVRKAAI | |
| signaling domain | TSYEKSDGVYTGLSTRNQETYETLKHEKPPQ | |
| CAT-CD70-357 | MALPVTALLLPLALLLHAARPQVQLVQSGAEVKKPGASVKVSCKASGYTFT | 2877 |
| CD8α signal peptide, | NYGMNWVRQAPGQGLKWMGWINTYTGEPTYADAFKGRVTMTRDTSISTAYM | |
| CD70 scFv (1F6), | ELSRLRSDDTAVYYCARDYGDYGMDYWGQGTTVTVSSGGGGSGGGGSGGGG | |
| IgG4 hinge-CH3, CD28 | SGDIVMTQSPDSLAVSLGERATINCRASKSVSTSGYSFMHWYQQKPGQPPK | |
| transmembrane domain, | LLIYLASNLESGVPDRFSGSGSGTDFTLTISSLQAEDVAVYYCQHSREVPW | |
| [symbol] | TFGQGTKVEIKESKYGPPCPSCPGQPREPQVYTLPPSQEEMTKNQVSLTCL | |
| [symbol] FCER1G | VKGFYPSDIAVEWESNGQPENNYKTTPPVLDSDGSFFLYSRLTVDKSRWQE | |
| signaling domain | GNVFSCSVMHEALHNHYTQKSLSLSLGKFWVLVVVGGVLACYSLLVTVAFI | |
| | IFWV [symbol] [symbol] RLKIQV | |
| | RKAAITSYEKSDGVYTGLSTRNQETYETLKHEKPPQ | |
| CAT-CD70-358 | MALPVTALLLPLALLLHAARPQVQLVQSGAEVKKPGASVKVSCKASGYTFT | 2879 |
| CD8α signal peptide, | NYGMNWVRQAPGQGLKWMGWINTYTGEPTYADAFKGRVTMTRDTSISTAYM | |
| CD70 scFv (1F6), | ELSRLRSDDTAVYYCARDYGDYGMDYWGQGTTVTVSSGGGGSGGGGSGGGG | |
| IgG4 hinge-CH2-CH3, | SGDIVMTQSPDSLAVSLGERATINCRASKSVSTSGYSFMHWYQQKPGQPPK | |
| CD28 transmembrane | LLIYLASNLESGVPDRFSGSGSGTDFTLTISSLQAEDVAVYYCQHSREVPW | |
| domain, [symbol] | TFGQGTKVEIKESKYGPPCPSCPAPEFLGGPSVFLFPPKPKDTLMISRTPE | |
| [symbol] | VTCVVVDVSQEDPEVQFNWYVDGVEVHNAKTKPREEQFNSTYRVVSVLTVL | |
| FCER1G signaling | HQDWLNGKEYKCKVSNKGLPSSIEKTISKAKGQPREPQVYTLPPSQEEMTK | |
| domain | NQVSLTCLVKGFYPSDIAVEWESNGQPENNYKTTPPVLDSDGSFFLYSRLT | |
| | VDKSRWQEGNVFSCSVMHEALHNHYTQKSLSLSLGKFWVLVVVGGVLACYS | |
| | LLVTVAFIIFWV [symbol] [symbol] | |
| | [symbol] RLKIQVRKAAITSYEKSDGVYTGLSTRNQETYETLKHEKPPQ | |
| CAT-CD 70-359 | MALPVTALLLPLALLLHAARPQVQLVQSGAEVKKPGASVKVSCKASGYTFT | 2881 |
| CD8α signal peptide, | NYGMNWVRQAPGQGLKWMGWINTYTGEPTYADAFKGRVTMTRDTSISTAYM | |
| CD70 scFv (1F6), | ELSRLRSDDTAVYYCARDYGDYGMDYWGQGTTVTVSSGGGGSGGGGSGGGG | |
| IgG4 mutant hinge, | SGDIVMTQSPDSLAVSLGERATINCRASKSVSTSGYSFMHWYQQKPGQPPK | |
| CD28 transmembrane | LLIYLASNLESGVPDRFSGSGSGTDFTLTISSLQAEDVAVYYCQHSREVPW | |
| domain, [symbol] | TFGQGTKVEIKESKYGPPCPSCPAPEFEGGPSVFLFPPKPKDTLMISRTPE | |
| [symbol] | VTCVVVDVSQEDPEVQFNWYVDGVEVHNAKTKPREEQFQSTYRVVSVLTVL | |
| FCER1G signaling | HQDWLNGKEYKCKVSNKGLPSSIEKTISKAKGQPREPQVYTLPPSQEEMTK | |
| domain | NQVSLTCLVKGFYPSDIAVEWESNGQPENNYKTTPPVLDSDGSFFLYSRLT | |
| | VDKSRWQEGNVFSCSVMHEALHNHYTQKSLSLSLGKFWVLVVVGGVLACYS | |
| | LLVTVAFIIFWV [symbol] [symbol] | |
| | [symbol] RLKIQVRKAAITSYEKSDGVYTGLSTRNQETYETLKHEKPPQ | |

### 5. Functional Effector Elements

[0265] The present disclosure provides an NK cell or a population of NK cells engineered to express a chimeric antigen receptor (CAR), optionally, wherein the CAR comprises a) an antigen recognition domain, b) a hinge domain, c) a transmembrane domain, c) a costimulatory domain and e) an activation domain, and further engineered to express a functional effector element, such as, at least one exogenous polypeptide selected from the group of a cytokine (e.g., a membrane-bound cytokine), a chemokine, ligand, receptor, monoclonal antibody, bispecific T cell engager, peptide or enzyme, a TGFbeta signal converter, a TGFbeta decoy receptor, a safety switch protein, a subunit or a portion of the foregoing, or any combination of the foregoing).

[0266] Functional effector elements are any polypeptides that may improve the persistence, proliferation, or survival of an immune cell (e.g., NK cell) in a tumor microenvironment or improve the homing of the immune cell to the tumor. Functional effector elements may also improve the effector function (e.g., cytolysis or cytokine production) of an immune cell or enable an immune cell to overcome the immunosuppressive effects of the tumor microenvironment. In some embodiments, functional effector elements are soluble (e.g., secreted by the cell). In some embodiments, functional effector elements are membrane bound. Exemplary functional effector elements include, but are not limited to, cytokines, chemokine receptors, heparanase, a therapeutic agent, or any protein that overcomes immunosuppression of the tumor microenvironment.

[0267] In some embodiments, the NK cell or population of NK cells comprising a CAR described herein is administered to a subject with one or more additional therapeutic agents that include but are not limited to cytokines. In some embodiments, the NK cell or population of NK cells comprising a CAR, as provided herein, are engineered to express a functional effector element selected from a therapeutic agent, a cytokine, a chemokine receptor, or a protein that overcomes immunosuppression of the tumor microenvironment. In some embodiments, an NK cell or population of NK cells provided herein comprises (e.g., is modified to express) or is administered to a subject with at least one therapeutic agent selected from p40, LIGHT, CD40L, FLT3L, 4-1BBL, FASL, and haparanase. In some embodiments, an NK cell or population of NK cells provided herein comprises (e.g., is modified to express) or is administered to a subject with at least one cytokine, wherein the cytokine comprises at least one chemokine, interferon, interleukin, lymphokine, tumor necrosis factor, or variant or combination thereof. In some embodiments, the cytokine is an interleukin. In some embodiments, the interleukin is IL-15, IL-21, IL-2, IL-12, IL18, IL-21, IL-1, IL-3, IL-4, IL-5, IL-6, IL-7, IL-8, IL-9, IL-10, IL-11, IL-13, IL-14, IL-15, IL-16, IL-17, IL-19, IL-20, IL-22, IL-23, IL-24, IL-25, IL-26, IL-27, IL-28, IL-29, IL-30, IL-31, IL-32, IL-33, functional variants thereof, fragments thereof or combinations thereof.

[0268] In some embodiments, the cytokine is a soluble cytokine, a membrane-bound cytokine and/or a cytokine that is co-expressed with a cytokine receptor. In some embodiments, the membrane-bound cytokine is IL-21. In some embodiments, the membrane-bound cytokine is IL-18. In some embodiments, the membrane bound cytokine is IL-12. In some embodiments, the membrane bound cytokine is IL-15. In some embodiments, IL-21 is co-expressed with IL-21R. In some embodiments, IL-18 is co-expressed with IL-18Ra. In some embodiments, IL-12 is co-expressed with IL-12Rβ1. In some embodiments, IL-15 is co-expressed with IL-15Ra.

[0269] IL-12 plays an essential role in mediating the interaction of the innate and adaptive arms of the immune system, acting on T-cells and natural killer (NK) cells, enhancing the proliferation and activity of cytotoxic lymphocytes and the production of other inflammatory cytokines, especially interferon-gamma (IFN-gamma). IL-12 is a heterodimer of a 35-kD subunit (p35) and a 40-kD subunit (p40) linked through a disulfide linkage to make fully functional IL-12p70. The IL-12 gene encodes both the p35 and p40 subunits. Thus, in some embodiments, an NK cell or population of NK cells provided herein comprises (e.g., is modified to express), or is administered to a subject with, one or more of IL-12, membrane-bound IL-12, a fusion protein comprising IL12 subunits p35 and p40.

[0270] Interleukin-15 (IL-15) is tissue restricted and only under pathologic conditions is it observed at any level in the serum, or systemically. IL-15 possesses several attributes that are desirable for adoptive therapy. IL-15 is a homeostatic cytokine that induces development and cell proliferation of natural killer cells, promotes the eradication of established tumors via alleviating functional suppression of tumor-resident cells, and inhibits AICD. NK cells expressing IL-15 are capable of continued supportive cytokine signaling, which is critical to their survival post-infusion. In some embodiments, an NK cell or population of NK cells provided herein comprises (e.g., is modified to express), or is administered to a subject with, at least one interleukin, wherein the interleukin comprises or consists of soluble or secreted IL-15, membrane bound IL-15 (mbIL-15), a IL-15 receptor alpha (mbIL-15Ra), a mbIL-15 with co-expressed IL-15Ra, a fusion of IL-15 and IL-15Ra, or a soluble IL-15 with co-expressed IL-15Ra. In some embodiments, the IL-15 is a soluble or secreted IL-15 that complexes with co-expressed IL15Ra on the NK cell or population of NK cells. Exemplary membrane bound IL-15 (mbIL-15) and fusion IL-15 and IL-15Ra are described in U.S. Pat. Nos. 10,428,305 and 9,629,877, each of which are incorporated herein by reference in their entirety. Exemplary membrane bound IL-15 are also described in Hurton et al. (2016) Proc. Nat'l. Acad. Sci. USA 113(48): E7788-97, incorporated herein by reference in its entirety.

[0271] The functional effector elements provided herein (also described as “exogenous stimulatory polypeptides” or “stimulatory polypeptides” herein) may comprise one or more linkers. For example, a linker may be disposed between two polypeptide sequences of the exogenous stimulatory polypeptide (e.g., between a cytokine polypeptide sequence and a transmembrane domain sequence, between two subunit sequences of an exogenous stimulatory polypeptide (e.g., between the p40 and p35 subunits of IL-12), or between two stimulatory polypeptides (e.g., IL-15 and IL-15RA)).

[0272] In some embodiments, the linker comprises or consists of at least 1, at least 2, at least 3, at least 4, at least 5, at least 6, at least 7, at least 8, at least 9, at least 10, at least 11, at least 12, at least 13, at least 14, at least 15, at least 16, at least 17, at least 18, at least 19, at least 20 or more amino acids in length. In some embodiments, the linker comprises or consists of between about 5 and about 25 amino acids in length, between about 5 and about 20 amino acids in length, between about 10 and about 25 amino acids in length, or between about 10 and about 20 amino acids in length. In some embodiments, the linker comprises or consists of 10, 11, 12, 13, 14, 15, 16, 17, 18, 19, or 20 amino acids in length. In a preferred embodiment, the linker is non-immunogenic.

[0273] In some embodiments, the linker comprises or consists of an amino acid sequence provided in Table 7.

[0274] In some embodiments, the linker comprises or consists of the amino acid sequence (GGGGS)n (SEQ ID NO: 665), wherein n is 1, 2, 3, 4, 5, 6, 7, 8, 9 or 10. In some embodiments, the linker comprises or consists of the amino acid sequence of SEQ ID NO: 652. In some embodiments, the linker comprises or consists of the amino acid sequence of SEQ ID NO: 653. In some embodiments, the linker comprises or consists of the amino acid sequence of SEQ ID NO: 654. In some embodiments, the linker comprises or consists of the amino acid sequence of SEQ ID NO: 655. In some embodiments, the linker comprises or consists of the amino acid sequence of SEQ ID NO: 654.

[0275] Other suitable linkers, which are known to one skilled in the art, may be used, e.g., to link an exogenous stimulatory polypeptide to a transmembrane domain, to link two exogenous stimulatory polypeptides (e.g., IL-15 and IL-15RA) or to link subunits of an exogenous stimulatory polypeptide (e.g., p30 and p40 of IL12). In certain embodiments, internal ribosome entry sites (IRES) elements are used to create multigene, or polycistronic messenger RNAs. IRES elements are able to bypass the ribosome scanning model of 5′ methylated Cap dependent translation and begin translation at internal sites. IRES elements from two members of the picornavirus family (polio and encephalomyocarditis) have been described, as well an IRES from a mammalian message. IRES elements can be linked to heterologous open reading frames. Multiple open reading frames can be transcribed together, each separated by an IRES, creating polycistronic messages. By virtue of the IRES element, each open reading frame is accessible to ribosomes for efficient translation. Multiple genes can be efficiently expressed using a single promoter/enhancer to transcribe a single message.

[0276] 2A sequence elements can be used to create linked- or co-expression of genes in the nucleic acid constructs provided in the present disclosure. For example, cleavage sequences could be used to co-express genes by linking open reading frames to form a single cistron. Exemplary cleavage sequences include but are not limited to T2A, P2A, E2A and F2A. In a preferred embodiment, the cleavage sequence comprises a P2A sequence.

[0277] In some embodiments, T2A comprises an amino acid sequence having at least 90%, 91%, 92%, 93%, 94%, 95%, 96%, 97%, 98%, 99% or 100% identity with the amino acid sequence of SEQ ID NO: 666.

[0278] In some embodiments, P2A comprises an amino acid sequence having at least 90%, 91%, 92%, 93%, 94%, 95%, 96%, 97%, 98%, 99% or 100% identity with the amino acid sequence of SEQ ID NO: 667.

[0279] In some embodiments, E2A comprises an amino acid sequence having at least 90%, 91%, 92%, 93%, 94%, 95%, 96%, 97%, 98%, 99% or 100% identity with the amino acid sequence of SEQ ID NO: 705.

[0280] In some embodiments, F2A comprises an amino acid sequence having at least 90%, 91%, 92%, 93%, 94%, 95%, 96%, 97%, 98%, 99% or 100% identity with the amino acid sequence of SEQ ID NO: 706.

[0281] In some embodiments, the cytokine is soluble IL-12. In some embodiments the cytokine is a membrane bound IL-12. In some cases, the IL-12p40 is indirectly linked to the IL-12p35 through a linker. In some embodiments, IL-12p40 and IL-12p35 are separated by an IRES sequence or a P2A sequence. In some embodiments, the cytokines described above can be under the control of an inducible promoter for gene transcription. In some embodiments, the inducible promoter is an EF1a promoter. In some embodiments, the inducible promoter is a PGK promoter.

[0282] In some embodiments, IL-12p40 comprises an amino acid sequence having at least 90%, 91%, 92%, 93%, 94%, 95%, 96%, 97%, 98%, 99% or 100% identity with the amino acid sequence of SEQ ID NO: 668.

[0283] In some embodiments, IL-12p35 comprises an amino acid sequence having at least 90%, 91%, 92%, 93%, 94%, 95%, 96%, 97%, 98%, 99% or 100% identity with the amino acid sequence of SEQ ID NO: 669.

[0284] An exemplary membrane bound IL-12 polypeptide “p40-(GS)15-IL15Ra(206-267)-P2A-p35” of the disclosure comprises or consists of the amino acid sequence of SEQ ID NO: 670. In some embodiments, the cytokine is soluble. In some embodiments the cytokine is membrane-bound. In some embodiments the cytokine is co-expressed with the cytokine receptor. In some embodiments, the cytokine is IL-15 or a fragment or variant thereof. In some embodiments the cytokine is a complex of IL-15 a fragment or variant thereof and a IL-15 Receptor alpha (IL-15Ra) or a fragment or variant thereof. In some embodiments, the IL-15 or a fragment or variant thereof and IL15Ra or fragment or variant thereof are expressed as a fusion polypeptide. In the case of the IL-15 fusion polypeptide, the IL-15 comprises a full-length IL-15 (e.g., a native IL-15 polypeptide) or fragment or variant thereof fused in frame with a full length IL-15Ra or functional fragment or variant thereof. In some cases, the IL-15 is linked to the IL-15Ra through a linker.

[0285] In some embodiments, the expression of any one of the functional effector elements provided herein (e.g., cytokines) can be under the control of an inducible promoter for gene transcription. In some embodiments, the inducible promoter is an EF1a promoter. In some embodiments, the inducible promoter is a PGK promoter.

[0286] In some embodiments, an NK cell or population of NK cells comprising (e.g., expressing) a CAR described herein also comprises (e.g., expresses) membrane-associated IL-15/IL-15RA. In some embodiments, an NK cell or population of NK cells comprising (e.g., expressing) a CAR described herein also comprises (e.g., expresses) mbIL-15 comprising a fusion protein between IL-15 and IL-15RA. In some embodiments, an NK cell or population of NK cells comprising (e.g., expressing) a CAR described herein also comprises (e.g., expresses) mbIL-15, wherein the mbIL-15 comprises, IL-15 and IL-15RA linked by a P2A sequence.

[0287] In some embodiments, the IL-15 comprises an amino acid sequence having at least 90%, 91%, 92%, 93%, 94%, 95%, 96%, 97%, 98%, 99% or 100% identity with the amino acid sequence of SEQ ID NO: 672.

[0288] In some embodiments, the IL-15 comprises an amino acid sequence having at least 90%, 91%, 92%, 93%, 94%, 95%, 96%, 97%, 98%, 99% or 100% identity with the amino acid sequence of SEQ ID NO: 2594.

[0289] In some embodiments, the IL-15 comprises an amino acid sequence having at least 90%, 91%, 92%, 93%, 94%, 95%, 96%, 97%, 98%, 99% or 100% identity with the amino acid sequence of SEQ ID NO: 673.

[0290] In some embodiments, mbIL-15RA comprises an amino acid sequence having at least 90%, 91%, 92%, 93%, 94%, 95%, 96%, 97%, 98%, 99% or 100% identity with the amino acid sequence of SEQ ID NO: 674.

[0291] In some embodiments, the IL-15 comprises an amino acid sequence having at least 90%, 91%, 92%, 93%, 94%, 95%, 96%, 97%, 98%, 99% or 100% identity with the amino acid sequence of SEQ ID NO: 2595.

[0292] In some embodiments, mbIL-15RA comprises an amino acid sequence having at least 90%, 91%, 92%, 93%, 94%, 95%, 96%, 97%, 98%, 99% or 100% identity with the amino acid sequence of SEQ ID NO: 675.

[0293] In some embodiments, an NK cell or population of NK cells comprising (e.g., expressing) a CAR described herein also comprises (e.g., expresses) an IgE Leader-IL-15-SG3-(SG4)5-SG3-1L15Ra, wherein the IgE Leader-IL-15-5G-3-(SG4)5-SG3-IL15Ra polypeptide comprises or consists of an amino acid sequence having at least 90%, 91%, 92%, 93%, 94%, 95%, 96%, 97%, 98%, 99% or 100% identity with the amino acid sequence of SEQ ID NO: 676.

[0294] In some embodiments, an NK cell or population of NK cells comprising (e.g., expressing) a CAR described herein also comprises (e.g., expresses) an IgE leader-IL-15-CD8a Tm+hinge polypeptide, wherein the IgE leader-IL-15-CD8a Tm+hinge polypeptide comprises or consists of an amino acid sequence having at least 90%, 91%, 92%, 93%, 94%, 95%, 96%, 97%, 98%, 99% or 100% identity with the amino acid sequence of SEQ ID NO: 677.

[0295] In some embodiments, an NK cell or population of NK cells comprising (e.g., expressing) a CAR described herein also comprises (e.g., expresses) a IL15-(GS)15-IL15Ra (206-267) polypeptide, wherein the IL15-(GS)15-IL15Ra (206-267) polypeptide comprises or consists of an amino acid sequence having at least 90%, 91%, 92%, 93%, 94%, 95%, 96%, 97%, 98%, 99% or 100% identity with the amino acid sequence of SEQ ID NO: 678.

[0296] Nucleic acids encoding a CAR and a functional effector protein (e.g., cytokine) described herein which may be used to modify an NK cell or population of NK cells are also provided. In some embodiments, a CAR (e.g., an anti-CD70 CAR) and a functional effector protein (e.g., cytokine (e.g., IL-15 or IL-15/IL-15RA)) are each encoded by a separate vector. In some embodiments, a CAR and a functional effector protein (e.g., a cytokine) are encoded by the same vector. In some embodiments, the CAR and the functional effector protein (e.g., a cytokine) are separated by a 2A sequence (e.g., a T2A sequence or a P2A sequence). In some embodiments, the cytokine comprises soluble or secreted IL-15, membrane bound IL-15 (mbIL-15), a IL-15 receptor alpha (mbIL-15RA), a mbIL-15 with co-expressed IL-15Ra, a fusion of IL-15 and IL-15RA, or a soluble IL-15 with co-expressed IL-15RA. In some embodiments, the functional effector protein is a soluble or secreted IL-15 that complexes with co-expressed IL15RA on the NK cell or population of NK cells. The soluble or secreted IL-15 and the IL15RA coding sequences may be separated by an internal ribosome entry site (IRES) sequence or a P2A sequence. In some embodiments, the IL15 and IL-15RA coding sequences are separated by a P2A linker sequence. In some embodiments, the cytokine is an IL-18. In some embodiments, the cytokine is a membrane bound IL-18 (mbIL-18). In some embodiments, the cytokine is an IL-21. In some embodiments, the cytokine is a membrane bound IL-21 (mbIL-21).

[0297] In some embodiments, the IL-18 comprises an amino acid sequence having at least 90%, 91%, 92%, 93%, 94%, 95%, 96%, 97%, 98%, 99% or 100% identity with the amino acid sequence of SEQ ID NO: 2596.

[0298] In some embodiments, the IL-21 comprises an amino acid sequence having at least 90%, 91%, 92%, 93%, 94%, 95%, 96%, 97%, 98%, 99% or 100% identity with the amino acid sequence of SEQ ID NO: 2597.

[0299] In some embodiments, the functional effector element is a chemokine receptor. Chemokines are a group of proteins that regulate cell trafficking and play roles in the regulation of immune response and homing of immune cells to tumors. Transgenic expression of chemokine receptors CCR2b or CXCR2 in T cells enhances trafficking to CCL2- or CXCL1-secreting solid tumors including melanoma and neuroblastoma (Craddock et al. (2010) J. Immunother. 33(8): 780-8 and Kershaw et al. (2002) Hum. Gene Ther. 13(16): 1971-80). Thus, without wishing to be bound by theory, it is believed that chemokine receptors expressed in CAR-expressing cells (e.g., the NK cells provided herein) may facilitate the cell's recognition of chemokines secreted by tumors, e.g., solid tumors, and improve homing of the CAR-expressing cell to the tumor, facilitate the infiltration of the CAR-expressing cell to the tumor, and enhances anti-tumor efficacy of the CAR-expressing cell. The chemokine receptor molecule can comprise a naturally occurring or recombinant chemokine receptor or a chemokine-binding fragment thereof. A chemokine receptor molecule suitable for expression in a CAR-expressing cell (e.g., NK cells) described herein include a CXC chemokine receptor (e.g., CXCR1, CXCR2, CXCR3, CXCR4, CXCR5, CXCR6, or CXCR7), a CC chemokine receptor (e.g., CCR1, CCR2, CCR3, CCR4, CCR5, CCR6, CCR7, CCR8, CCR9, CCR10, or CCR11), a CX3C chemokine receptor (e.g., CX3CR1), a XC chemokine receptor (e.g., XCR1), or a chemokine-binding fragment thereof. In some embodiment, the chemokine receptor molecule to be expressed with a CAR described herein is selected based on the chemokine(s) secreted by the tumor. In some embodiments, the CAR-expressing cell described herein further comprises, e.g., expresses, a CCR4 receptor. In some embodiments, the CAR described herein and the chemokine receptor molecule are on the same vector or are on two different vectors. In embodiments where the CAR described herein and the chemokine receptor molecule are on the same vector, the CAR and the chemokine receptor molecule may each be under control of two different promoters or are under the control of the same promoter.

[0300] Activity of immunotherapies in cancer, has been limited in part due to the immunosuppressive solid tumor microenvironment (TME). The overproduction of immunosuppressive cytokines, including TGFbeta, by tumor cells and tumor-infiltrating lymphocytes contributes to an immunosuppressive tumor microenvironment. TGFbeta inhibits immune cell function via a variety of mechanisms. TGFbeta is frequently associated with tumor metastasis and invasion, inhibiting the function of immune cells, and poor prognosis in patients with cancer.

[0301] In some embodiments, the CAR-expressing NK cell described herein can further express a functional effector element which senses an immunosuppressive signal and inverts it into a cell activation signal, e.g., an agent which enhances the activity of a CAR-expressing cell. In some embodiments, the functional effector element can be an agent which inhibits an inhibitory molecule. Inhibitory molecules, e.g., PD1, can, in some instances, decrease the ability of a CAR-expressing cell to mount an immune effector response. Examples of inhibitory molecules include but are not limited to B7, CD155, PDL1, and TGFβ. In one instance, the functional effector element comprises a first polypeptide, e.g., a polypeptide that detects, recognizes or binds to an immunosuppressive molecule in the tumor microenvironment, associated with a second polypeptide that provides a positive signal to the cell, e.g., an intracellular signaling domain described herein. In some embodiments, the functional effector comprises a first polypeptide, e.g., PD1, TGFBR, or an antigen binding fragment thereof (e.g., at least a portion of an extracellular domain of any of these), and a second polypeptide which is an intracellular signaling domain described herein (e.g., comprising a costimulatory domain (e.g., DAP12, DAP10, OX40, OX40L, 4-1BB, ICOS, CD27 or CD28, e.g., as described herein) and/or an activation domain (e.g., a DAP12, FCER1G or CD3 zeta signaling domain described herein).

[0302] In some embodiments, the functional effector element comprises a first polypeptide of TGFBR or a fragment thereof (e.g., at least a portion of an extracellular domain and transmembrane domain of TGF-beta receptor (TGFBR) (e.g., TGF-beta receptor 1 (TGFBR1, used interchangeably herein with TGFBRI) and/or TGF-beta receptor 2 (TGFBR2, used interchangeably herein with TGFBRII; e.g., amino acid residues 1-166, 1-199, 23-166 or 23-199 of NCBI Reference Sequence: NP_003233 or amino acid residues 1-165, 22-165, 1-198 of SEQ ID NO: 679)), and a second polypeptide of an intracellular signaling domain described herein (e.g., a DAP10 costimulatory domain described herein and/or a CD3 zeta activation domain described herein).

[0303] In some embodiments, the functional effector element comprises a TGFBR or fragment thereof which a genetic modification. In some embodiments, the genetic modification converts an inhibitory signal to an activating signal. To allow for the enhanced in vivo ability to overcome tumor microenvironment of NK cells, the cells may be engineered to express a functional effector element such as TGFβ signal converter, a TGFβ decoy receptor (e.g, a TGFBR2 dominant negative receptor (TGFBR1DN) or a TGFBR2 dominant negative receptor (TGFBR2DN)). For example, binding of a TGFBR comprising a genetic modification to a TGFβ ligand in the microenvironment can convert inhibitory signals into activating signals, thereby allowing NK cells to simultaneously resist the immune suppression and achieve enhanced activation leading to superior in vitro and in vivo anti-tumor efficacy. Exemplary TGFBR genetic modifications are described in Burga et al. Clin. Cancer Res. 25(14):4400-12 and WO 2021/010951, both of which are incorporated herein by reference. In some embodiments, the TGFBR or fragment thereof comprising a genetic modification is a TGFβ decoy receptor. In some embodiments, the TGFβ decoy receptor comprises the extracellular domain of a TGFβ receptor (e.g., the extracellular domain of TGFBR1 or TGFBR2) and the transmembrane domain of a TGFβ receptor (e.g., the transmembrane domain of TGFBR1 or TGFBR2). In some embodiments, the TGFβ decoy receptor comprises the extracellular domain of TGFBR2 (with or without TGFBR2's signal peptide) and the transmembrane domain of TFGBR2 (e.g., amino acid residues 1-199 or 23-199 of NCBI Reference Sequence: NP_003233 or amino acid residues 1-198 or 22-198 of SEQ ID NO: 679). In some embodiments, a TGFβ decoy receptor comprises the extracellular domain of a TGFβ receptor (e.g., the extracellular domain of TGFBR1 or TGFBR2 (e.g., amino acid residues 1-166 or 23-166 of NCBI Reference Sequence: NP_003233 or amino acid residues 1-165 or 22-165 of SEQ ID NO: 679)) and a heterologous transmembrane domain (e.g., any of the transmembrane domains provided herein (e.g., a CD28 transmembrane domain)). In some embodiments, the TGFβ decoy receptor is TGFBR2DN (e.g., comprising an amino acid sequence having at least 90%, 91%, 92%, 93%, 94%, 95%, 96%, 97%, 98%, 99% or 100% identity to the amino acid sequence of SEQ ID NO: 679 or 2696). TGFBR2DN can function as a cytokine sink to deplete endogenous TGFβ ligand.

[0304] In some embodiments, the functional effector element comprises a first polypeptide of PD1 or a fragment thereof (e.g., at least a portion of an extracellular domain and transmembrane domain of PD1), and a second polypeptide of an intracellular signaling domain described herein (e.g., a DAP10 costimulatory domain described herein and/or a CD3 zeta signaling activation domain described herein). In some embodiments, the CAR-expressing cell described herein comprises a switch costimulatory receptor, e.g., as described in WO 2013/019615, which is incorporated herein by reference. PD1 is an inhibitory member of the CD28 family of receptors that also includes CD28, CTLA-4, ICOS, and BTLA.

[0305] In some embodiments, the functional effector element comprises an IL-18 receptor or fragment thereof comprising a genetic modification. IL-18BP, a high affinity IL-18 decoy receptor is frequently upregulated in diverse human and mouse tumors and limits the anti-tumor activity of IL-18. For example, a genetic modification of the IL-18 decoy receptor (i.e., decoy resistant IL-18 or DR-18) can maintain signaling potential but does not transduce inhibitory signals from binding to IL-18BP. This can thereby allow NK cells to simultaneously resist the immune suppression and achieve enhanced activation leading to superior in vitro and in vivo anti-tumor efficacy. Exemplary IL-18 decoy receptor genetic modifications are described in Zhou et al. Nature 583(7817): 609-14, 2020 and are incorporated herein by reference. In some embodiments, the IL-18 receptor or fragment thereof comprising a genetic modification is a decoy resistant IL-18 (DR-18).

[0306] In some embodiments, the functional effector element may comprise a TGFBR2DN functional effector element polypeptide comprising or consisting of an amino acid sequence having at least 90%, 91%, 92%, 93%, 94%, 95%, 96%, 97%, 98%, 99% or 100% identity with the amino acid sequence of SEQ ID NO: 679 (with or without the signal peptide noted in Table 7). For example, in some embodiments, the functional effector element may comprise a TGFBR2DN functional effector element polypeptide comprising or consisting of amino acid residues 22-198 of SEQ ID NO: 679.

[0307] In some embodiments, the functional effector element may comprise a TGFBR2DN functional effector element polypeptide comprising or consisting of an amino acid sequence having at least 90%, 91%, 92%, 93%, 94%, 95%, 96%, 97%, 98%, 99% or 100% identity with the amino acid sequence of SEQ ID NO: 2696 (with or without the signal peptide noted in Table 7). For example, in some embodiments, the functional effector element may comprise a TGFBR2DN functional effector element polypeptide comprising or consisting of amino acid residues 23-205 of SEQ ID NO: 2696.

[0308] In some embodiments, the functional effector element may comprise a PD1 functional effector element polypeptide comprising or consisting of an amino acid sequence having at least 90%, 91%, 92%, 93%, 94%, 95%, 96%, 97%, 98%, 99% or 100% identity with the amino acid sequence of SEQ ID NO: 680.

[0309] Table 7 provides exemplary sequences of cytokines, linkers and functional effector elements which can be used in the constructs disclosed herein. In some embodiments, the functional effector elements of any one of SEQ ID NOs: 672, 2594, 674, 2595, 676, 677, 678, and 2696 do not comprise the indicated leader peptide sequence.

TABLE 7
Exemplary Construct Components

| | | |
|---|---|---|
| Exemplary | | |
| Construct | | SEQ ID |
| Components | Amino Acid Sequence | NO: |

LINKER

| | |
|---|---|
| GGGGS | 651 |
| GGGGSGGGGSGGGGS | 652 |
| GGSGGSGGYPYDVPDYAGGGSGGGS | 653 |
| GGSGGSGGGGGSGGGSGGGSGGGS | 654 |
| GGSGGSGGGPEDEPGSGSGGGSGGGS | 655 |
| GGSGGSGGGGGSGGGSGGGSGGGSGSGSGSGSEDGSGSGSGS | 656 |
| GSGSGSGSGSEDEDEDEDGSGSGSGSGS | 657 |
| GGGGSGGGGSGGGGSGGGGS | 658 |
| GSGSGSGSEDGSGSGSGS | 659 |
| GSGSGSGSGSGSGSGSGS | 660 |
| GCGGSGGGGSGGGGS | 661 |
| SGRGGGGSGGGGSGGGGSGGGGSSPA | 662 |
| GGGGSGGGGSGGGGSGGGGSGGGG | 663 |
| SGRGASSGSSGSGSQKKPRYEIRWKVVVISAILALVVLTVISLIILIMLW | 664 |
| GSGMQSPA | |

2A SEQUENCE ELEMENTS

| | | |
|---|---|---|
| T2A | GSGEGRGSLLTCGDVEENPGP | 666 |
| P2A | GSGATNFSLLKQAGDVEENPGP | 667 |
| E2A | GSGQCTNYALLKLAGDVESNPGP | 705 |
| F2A | GSGVKQTLNFDLLKLAGDVESNPGP | 706 |

FUNCTIONAL EFFECTOR ELEMENTS

| | | |
|---|---|---|
| IL-12p40 | CPARSLLLVATLVLLDHLSLARNLPVATPDPGMFPCLHHSQNLLRAVSNM | 668 |
| | LQKARQTLEFYPCTSEEIDHEDITKDKTSTVEACLPLELTKNESCLNSRE | |
| | TSFITNGSCLASRKTSFMMALCLSSIYEDLKMYQVEFKTMNAKLLMDPKR | |
| | QIFLDQNMLAVIDELMQALNFNSETVPQKSSLEEPDFYKTKIKLCILLHA | |
| | FRIRAVTIDRVMSYLNAS | |
| IL-12p35 | CHQQLVISWFSLVFLASPLVAIWELKKDVYVVELDWYPDAPGEMVVLTCD | 669 |
| | TPEEDGITWTLDQSSEVLGSGKTLTIQVKEFGDAGQYTCHKGGEVLSHSL | |
| | LLLHKKEDGIWSTDILKDQKEPKNKTFLRCEAKNYSGRFTCWWLTTISTD | |
| | LTFSVKSSRGSSDPQGVTCGAATLSAERVRGDNKEYEYSVECQEDSACPA | |
| | AEESLPIEVMVDAVHKLKYENYTSSFFIRDIIKPDPPKNLQLKPLKNSRQ | |
| | VEVSWEYPDTWSTPHSYFSLTFCVQVQGKSKREKKDRVFTDKTSATVICR | |
| | KNASISVRAQDRYYSSSWSEWASVPCS | |
| membrane-bound | CPARSLLLVATLVLLDHLSLARNLPVATPDPGMFPCLHHSQNLLRAVSNM | 670 |
| IL-12 polypeptide | LQKARQTLEFYPCTSEEIDHEDITKDKTSTVEACLPLELTKNESCLNSRE | |
| “p40-(GS)15- | TSFITNGSCLASRKTSFMMALCLSSIYEDLKMYQVEFKTMNAKLLMDPKR | |
| IL15Ra(206-267)- | QIFLDQNMLAVIDELMQALNFNSETVPQKSSLEEPDFYKTKIKLCILLHA | |
| P2A-p35” | FRIRAVTIDRVMSYLNASGSGSGSGSGSGSGSGSGSGSGSGSGSGSGSVA | |
| IL12p40, linker, IL- | ISTSTVLLCGLSAVSLLACYLKSRQTPPLASVEMEAMEALPVTWGTSSRD | |
| 15, IL15RA, P2A, | EDLENCSHHL [symbol] MCHQQLVISWFSLVFLAS | |
| IL12p35 | PLVAIWELKKDVYVVELDWYPDAPGEMVVLTCDTPEEDGITWTLDQSSEV | |
| | LGSGKTLTIQVKEFGDAGQYTCHKGGEVLSHSLLLLHKKEDGIWSTDILK | |
| | DQKEPKNKTFLRCEAKNYSGRFTCWWLTTISTDLTFSVKSSRGSSDPQGV | |
| | TCGAATLSAERVRGDNKEYEYSVECQEDSACPAAEESLPIEVMVDAVHKL | |
| | KYENYTSSFFIRDIIKPDPPKNLQLKPLKNSRQVEVSWEYPDTWSTPHSY | |
| | FSLTFCVQVQGKSKREKKDRVFTDKTSATVICRKNASISVRAQDRYYSSS | |
| | WSEWASVPCS | |
| IL-15 | MRISKPHLRSISIQCYLCLLLNSHFLTEAGIHVFILGCFSAGLPKTEANW | 672 |
| leader, pro-peptide, | VNVISDLKKIEDLIQSMHIDATLYTESDVHPSCKVTAMKCFLLELQVISL | |
| mature cytokine | ESGDASIHDTVENLIILANNSLSSNGNVTESGCKECEELEEKNIKEFLQS | |
| | FVHIVQMFINTS | |
| IL-15 | RISKPHLRSISIQCYLCLLLNSHFLTEAGIHVFILGCFSAGLPKTEANWV | 2594 |
| leader, pro-peptide, | NVISDLKKIEDLIQSMHIDATLYTESDVHPSCKVTAMKCFLLELQVISLE | |
| mature cytokine | SGDASIHDTVENLIILANNSLSSNGNVTESGCKECEELEEKNIKEFLQSF | |
| | VHIVQMFINTS | |
| IL-15 | NWVNVISDLKKIEDLIQSMHIDATLYTESDVHPSCKVTAMKCFLLELQVI | 673 |
| | SLESGDASIHDTVENLIILANNSLSSNGNVTESGCKECEELEEKNIKEFL | |
| | QSFVHIVQMFINTS | |
| mbIL-15RA | MAPRRARGCRTLGLPALLLLLLLRPPATRGITCPPPMSVEHADIWVKSYS | 674 |
| leader, | LYSRERYICNSGFKRKAGTSSLTECVLNKATNVAHWTTPSLKCIRDPALV | |
| extracellular, | HQRPAPPSTVTTAGVTPQPESLSPSGKEPAASSPSSNNTAATTAAIVPGS | |
| transmembrane | QLMPSKSPSTGTTEISSHESSHGTPSQTTAKNWELTASASHQPPGVYPQG | |
| domain | HSDTTVAISTSTVLLCGLSAVSLLACYLKSRQTPPLASVEMEAMEALPVT | |
| intracellular domain | WGTSSRDEDLENCSHHL | |
| mbIL-15RA | APRRARGCRTLGLPALLLLLLLRPPATRGITCPPPMSVEHADIWVKSYSL | 2595 |
| leader, | YSRERYICNSGFKRKAGTSSLTECVLNKATNVAHWTTPSLKCIRDPALVH | |
| extracellular, | QRPAPPSTVTTAGVTPQPESLSPSGKEPAASSPSSNNTAATTAAIVPGSQ | |
| transmembrane | LMPSKSPSTGTTEISSHESSHGTPSQTTAKNWELTASASHQPPGVYPQGH | |
| domain | SDTTVAISTSTVLLCGLSAVSLLACYLKSRQTPPLASVEMEAMEALPVTW | |
| intracellular domain | GTSSRDEDLENCSHHL | |
| mbIL-15RA | ITCPPPMSVEHADIWVKSYSLYSRERYICNSGFKRKAGTSSLTECVLNKA | 675 |
| | TNVAHWTTPSLKCIRDPALVHQRPAPPSTVTTAGVTPQPESLSPSGKEPA | |
| | ASSPSSNNTAATTAAIVPGSQLMPSKSPSTGTTEISSHESSHGTPSQTTA | |
| | KNWELTASASHQPPGVYPQGHSDTTVAISTSTVLLCGLSAVSLLACYLKS | |
| | RQTPPLASVEMEAMEALPVTWGTSSRDEDLENCSHHL | |
| IgE Leader-IL-15- | MDWTWILFLVAAATRVHSNWVNVISDLKKIEDLIQSMHIDATLYTESDVH | 676 |
| SG3-(SG4)5-SG3- | PSCKVTAMKCFLLELQVISLESGDASIHDTVENLIILANNSLSSNGNVTE | |
| IL15Ra)” | SGCKECEELEEKNIKEFLQSFVHIVQMFINTSSGGGSGGGGSGGGGSGGG | |
| IgE Leader, IL-15, | GSGGGGSGGGGSGGGITCPPPMSVEHADIWVKSYSLYSRERYICNSGFKR | |
| linker, IL-15RA | KAGTSSLTECVLNKATNVAHWTTPSLKCIRDPALVHQRPAPPSTVTTAGV | |
| | TPQPESLSPSGKEPAASSPSSNNTAATTAAIVPGSQLMPSKSPSTGTTEI | |
| | SSHESSHGTPSQTTAKNWELTASASHQPPGVYPQGHSDTTVAISTSTVLL | |
| | CGLSAVSLLACYLKSRQTPPLASVEMEAMEALPVTWGTSSRDEDLENCSH | |
| | HL | |
| IgE leader-IL-15- | MDWTWILFLVAAATRVHSNWVNVISDLKKIEDLIQSMHIDATLYTESDVH | 677 |
| CD8α Tm + hinge | PSCKVTAMKCFLLELQVISLESGDASIHDTVENLIILANNSLSSNGNVTE | |
| IgE Leader, IL-15, | SGCKECEELEEKNIKEFLQSFVHIVQMFINTSTTTPAPRPPTPAPTIASQ | |
| CD8TM, hinge | PLSLRPEACRPAAGGAVHTRGLDFACDIYIWAPLAGTCGVLLLSLVITLY | |
| | C | |
| IgE leader-IL15- | MDWTWILFLVAAATRVHSNWVNVISDLKKIEDLIQSMHIDATLYTESDVH | 678 |
| (GS)15-IL15RA | PSCKVTAMKCFLLELQVISLESGDASIHDTVENLIILANNSLSSNGNVTE | |
| (206-267)” | SGCKECEELEEKNIKEFLQSFVHIVQMFINTSGSGSGSGSGSGSGSGSGS | |
| | GSGSGSGSGSGSVAISTSTVLLCGLSAVSLLACYLKSRQTPPLASVEMEA | |
| | MEALPVTWGTSSRDEDLENCSHHL | |
| IL-18 | AAEPVEDNCINFVAMKFIDNTLYFIAEDDENLESDYFGKLESKLSVIRNL | 2596 |
| | NDQVLFIDQGNRPLFEDMTDSDCRDNAPRTIFIISMYKDSQPRGMAVTIS | |
| | VKCEKISTLSCENKIISFKEMNPPDNIKDTKSDIIFFQRSVPGHDNKMQF | |
| | ESSSYEGYFLACEKERDLFKLILKKEDELGDRSIMFTVQNED | |
| IL-21 | RSSPGNMERIVICLMVIFLGTLVHKSSSQGQDRHMIRMRQLIDIVDQLKN | 2597 |
| | YVNDLVPEFLPAPEDVETNCEWSAFSCFQKAQLKSANTGNNERIINVSIK | |
| | KLKRKPPSTNAGRRQKHRLTCPSCDSYEKKPPKEFLERFKSLLQKMIHQH | |
| | LSSRTHGSEDS | |
| TGFBR2DN (leader | GRGLLRGLWPLHIVLWTRIASTIPPHVQKSVNNDMIVTDNNGAVKFPQLC | 679 |
| peptide sequence | KFCDVRFSTCDNQKSCMSNCSITSICEKPQEVCVAVWRKNDENITLETVC | |
| underlined) | HDPKLPYHDFILEDAASPKCIMKEKKKPGETFFMCSCSSDECNDNIIFSE | |
| | EYNTSNPDLLLVIFQVTGISLLPPLGVAISVIIIFYCYRVNRQQKLSS | |
| PD1 functional | MQIPQAPWPVVWAVLQLGWRPGWFLDSPDRPWNPPTFSPALLVVTEGDNA | 680 |
| effector element | TFTCSFSNTSESFVLNWYRMSPSNQTDKLAAFPEDRSQPGQDCRFRVTQL | |
| | PNGRDFHMSVVRARRNDSGTYLCGAISLAPKAQIKESLRAELRVTERRAE | |
| | VPTAHPSPSPRPAGQFQTLVV | |
| TGFBR2DN | MGRGLLRGLWPLHIVLWTRIASTIPPHVQKSVNNDMIVTDNNGAVKFPQL | 2696 |
| (TGFBR2 ECD | CKFCDVRFSTCDNQKSCMSNCSITSICEKPQEVCVAVWRKNDENITLETV | |
| fused to CD28 | CHDPKLPYHDFILEDAASPKCIMKEKKKPGETFFMCSCSSDECNDNIIFS | |
| transmembrane | EEYNTSNPDLLLVIFQFWVLVVVGGVLACYSLLVTVAFIIFWVCYRVNRQ | |
| domain) (leader | QKLSS | |
| peptide sequence | | |
| underlined) | | |

[0310] Table 8 shows exemplary constructs disclosed herein comprising an anti-CD70 CAR and a functional effector element.

TABLE 8
Exemplary constructs comprising an anti-CD70 CAR and a functional effector element.

| | | Antigen | | | | | | | | | | | |
|---|---|---|---|---|---|---|---|---|---|---|---|---|---|
| | | Recognition | | | | | | | | | | | |
| | Signal | Domain | | | Co- | Activation | | | | | | | |
| ID | Peptide | (Binder) | Hinge | TM | stimulatory 1 | domain 2 | P2A | | | P2A | | P2A | |
| CAT-70-008 | CD27 | CD27 ECD | — | CD27 | CD27 | CD3z | P2A | p40 | — | P2A | p35 | — | — |
| CAT-70-009 | CD27 | CD27 ECD | — | CD27 | CD27 | CD3z | P2A | IL-15 | — | P2A | IL-15Rα | — | — |
| CAT-70-010a | CD27 | CD27 ECD | — | CD27 | CD27 | CD3z | P2A | TGFBRII | DAP12 | — | — | — | — |
| | | | | | | | | ECD | ICD | | | | |
| CAT-70-010b | CD27 | CD27 ECD | — | CD27 | CD27 | CD3z | P2A | PD1 ECD | DAP12 | — | — | — | — |
| | | | | | | | | | ICD | | | | |
| CAT-CD70-120 | CD27 | CD27 ECD | — | CD27 | 4-1BB | CD3z | P2A | IL-15 | — | — | — | — | — |
| CAT-CD70-121 | CD27 | CD27 ECD | — | CD27 | 4-1BB | CD3z | P2A | IL-15Rα | — | P2A | IL-15 | — | — |
| CAT-CD70-128 | CD8a | 1F6 | CD8a | CD8a | 4-1BB | CD3z | P2A | IL-15 | — | — | — | — | — |
| CAT-CD70-129 | CD8a | 1F6 | CD8a | CD8a | 4-1BB | CD3z | P2A | IL-15Rα | — | P2A | IL-15 | — | — |
| CAT-CD70-131 | CD8a | 1F6 | IgG1 | CD28 | CD28 | CD3z | P2A | IL-15 | — | — | — | — | — |
| CAT-CD70-132 | CD8a | 1F6 | IgG1 | CD28 | CD28 | CD3z | P2A | IL-15Rα | — | P2A | IL-15 | — | — |
| CAT-CD70-210 | CD27 | CD27 ECD | — | CD27 | CD27 | CD3z | P2A | IL-15 | — | — | — | — | — |
| CAT-CD70-211 | CD8a | 1F6 | CD8a | CD8a | CD28 | CD3z | P2A | IL-15 | — | — | — | — | — |
| CAT-CD70-212 | CD27 | CD27 ECD | — | CD27 | CD27 | CD3z | P2A | IL-15Rα | — | P2A | IL-15 | — | — |
| CAT-CD70-213 | CD8a | 1F6 | CD8a | CD8a | CD28 | CD3z | P2A | IL-15Rα | — | P2A | IL-15 | — | — |
| CAT-CD70-214 | CD27 | CD27 ECD | — | CD27 | CD27 | CD3z | P2A | mbIL12 | — | — | — | — | — |
| CAT-CD70-215 | CD27 | CD27 ECD | — | CD27 | 4-1BB | CD3z | P2A | mbIL12 | — | — | — | — | — |
| CAT-CD70-216 | CD8a | 1F6 | CD8a | CD8a | CD28 | CD3z | P2A | mbIL12 | — | — | — | — | — |
| CAT-CD70-217 | CD8a | 1F6 | CD8a | CD8a | 4-1BB | CD3z | P2A | mbIL12 | — | — | — | — | — |
| CAT-CD70-218 | CD8a | 1F6 | IgG1 | CD28 | CD28 | CD3z | P2A | mbIL12 | — | — | — | — | — |
| CAT-CD70-219 | CD27 | CD27 ECD | — | CD27 | CD27 | CD3z | P2A | IL18 | — | — | — | — | — |
| CAT-CD70-220 | CD27 | CD27 ECD | — | CD27 | 4-1BB | CD3z | P2A | IL18 | — | — | — | — | — |
| CAT-CD70-221 | CD8a | 1F6 | CD8a | CD8a | CD28 | CD3z | P2A | IL18 | — | — | — | — | — |
| CAT-CD70-222 | CD8a | 1F6 | CD8a | CD8a | 4-1BB | CD3z | P2A | IL18 | — | — | — | — | — |
| CAT-CD70-223 | CD8a | 1F6 | IgG1 | CD28 | CD28 | CD3z | P2A | IL18 | — | — | — | — | — |
| CAT-CD70-224 | CD27 | CD27 ECD | — | CD27 | CD27 | CD3z | P2A | IL21 | — | — | — | — | — |
| CAT-CD70-225 | CD27 | CD27 ECD | — | CD27 | 4-1BB | CD3z | P2A | IL21 | — | — | — | — | — |
| CAT-CD70-226 | CD8a | 1F6 | CD8a | CD8a | CD28 | CD3z | P2A | IL21 | — | — | — | — | — |
| CAT-CD70-227 | CD8a | 1F6 | CD8a | CD8a | 4-1BB | CD3z | P2A | IL21 | — | — | — | — | — |
| CAT-CD70-228 | CD8a | 1F6 | IgG1 | CD28 | CD28 | CD3z | P2A | IL21 | — | — | — | — | — |
| CAT-CD70-239 | CD27 | CD27 ECD | — | CD27 | 4-1BB | CD3z | P2A | p40 | — | P2A | p35 | — | — |
| CAT-CD70-240 | CD8a | 1F6 | CD8a | CD8a | 4-1BB | CD3z | P2A | p40 | — | P2A | p35 | — | — |
| CAT-CD70-241 | CD8a | 1F6 | IgG1 | CD28 | CD28 | CD3z | P2A | p40 | — | P2A | p35 | — | — |
| CAT-CD70-243 | CD8a | 1F6 | CD8a | CD8a | CD28 | CD3z | P2A | p40 | — | P2A | p35 | — | — |
| CAT-CD70-246 | CD27 | CD27 ECD | — | CD27 | CD27 | CD3z | P2A | TGFbR2DN | — | — | — | — | — |
| CAT-CD70-247 | CD27 | CD27 ECD | — | CD27 | 4-1BB | CD3z | P2A | TGFbR2DN | — | — | — | — | — |
| CAT-CD70-248 | CD8a | 1F6 | CD8a | CD8a | CD28 | CD3z | P2A | TGFbR2DN | — | — | — | — | — |
| CAT-CD70-249 | CD8a | 1F6 | CD8a | CD8a | 4-1BB | CD3z | P2A | TGFbR2DN | — | — | — | — | — |
| CAT-CD70-250 | CD8a | 1F6 | IgG1 | CD28 | CD28 | CD3z | P2A | TGFbR2DN | — | — | — | — | — |
| CAT-CD70-251 | CD27 | CD27 ECD | — | CD27 | CD27 | CD3z | P2A | TGFbR2DN | — | P2A | IL-15 | — | — |
| CAT-CD70-252 | CD27 | CD27 ECD | — | CD27 | 4-1BB | CD3z | P2A | TGFbR2DN | — | P2A | IL-15 | — | — |
| CAT-CD70-253 | CD8a | 1F6 | CD8a | CD8a | CD28 | CD3z | P2A | TGFbR2DN | — | P2A | IL-15 | — | — |
| CAT-CD70-254 | CD8a | 1F6 | CD8a | CD8a | 4-1BB | CD3z | P2A | TGFbR2DN | — | P2A | IL-15 | — | — |
| CAT-CD70-255 | CD8a | 1F6 | IgG1 | CD28 | CD28 | CD3z | P2A | TGFbR2DN | — | P2A | IL-15 | — | — |
| CAT-CD70-256 | CD27 | CD27 ECD | — | CD27 | CD27 | CD3z | P2A | TGFbR2DN | — | P2A | IL-15Rα | P2A | IL-15 |
| CAT-CD70-257 | CD27 | CD27 ECD | — | CD27 | 4-1BB | CD3z | P2A | TGFbR2DN | — | P2A | IL-15Rα | P2A | IL-15 |
| CAT-CD70-258 | CD8a | 1F6 | CD8a | CD8a | CD28 | CD3z | P2A | TGFbR2DN | — | P2A | IL-15Rα | P2A | IL-15 |
| CAT-CD70-259 | CD8a | 1F6 | CD8a | CD8a | 4-1BB | CD3z | P2A | TGFbR2DN | — | P2A | IL-15Rα | P2A | IL-15 |
| CAT-CD70-260 | CD8a | 1F6 | IgG1 | CD28 | CD28 | CD3z | P2A | TGFbR2DN | — | P2A | IL-15Rα | P2A | IL-15 |

[0311] Table 9 shows exemplary sequences of constructs disclosed herein comprising an anti-CD70 CAR and a functional effector element. In some embodiments, the exemplary sequences of constructs of any one of SEQ ID NOs: 701-704 or 2598-2641 does not comprise the indicated signal peptide(s).

TABLE 9
Exemplary Sequences of constructs comprising an anti-CD70 CAR and a
functional effector element.

| Exemplary CAR | | SEQ |
|---|---|---|
| Name and Domains | Amino Acid Sequence | ID NO: |
| CAT-70-008 | MARPHPWWLCVLGTLVGLSATPAPKSCPERHYWAQGKLCCQMCEPGTFLV | 701 |
| CD27 signal peptide, | KDCDQHRKAAQCDPCIPGVSFSPDHHTRPHCESCRHCNSGLLVRNCTITA | |
| CD27 extracellular | NAECACRNGWQCRDKECTECDPLPNPSLTARSSQALSPHPQPTHLPYVSE | |
| domain, CD27 | MLEARTAGHMQTLADFRQLPARTLSTHWPPQRSLCSSDFIRILVIFSGMF | |
| transmembrane | LVFTLAGALFL [symbol] [symbol] | |
| domain, [symbol] | [symbol] RVKFSRSADAPAYQQGQNQLYNELNLGRREEYDVLDKRRG | |
| [symbol] | RDPEMGGKPRRKNPQEGLYNELQKDKMAEAYSEIGMKGERRRGKGHDGLY | |
| CD3z signaling | QGLSTATKDTYDALHMQALPPRGSGATNFSLLKQAGDVEENPGPCPARSL | |
| domain, P2A, p40, | LLVATLVLLDHLSLARNLPVATPDPGMFPCLHHSQNLLRAVSNMLQKARQ | |
| P2A, p35 | TLEFYPCTSEEIDHEDITKDKTSTVEACLPLELTKNESCLNSRETSFITN | |
| | GSCLASRKTSFMMALCLSSIYEDLKMYQVEFKTMNAKLLMDPKRQIFLDQ | |
| | NMLAVIDELMQALNFNSETVPQKSSLEEPDFYKTKIKLCILLHAFRIRAV | |
| | TIDRVMSYLNASGSGATNFSLLKQAGDVEENPGPCHQQLVISWFSLVFLA | |
| | SPLVAIWELKKDVYVVELDWYPDAPGEMVVLTCDTPEEDGITWTLDQSSE | |
| | VLGSGKTLTIQVKEFGDAGQYTCHKGGEVLSHSLLLLHKKEDGIWSTDIL | |
| | KDQKEPKNKTFLRCEAKNYSGRFTCWWLTTISTDLTFSVKSSRGSSDPQG | |
| | VTCGAATLSAERVRGDNKEYEYSVECQEDSACPAAEESLPIEVMVDAVHK | |
| | LKYENYTSSFFIRDIIKPDPPKNLQLKPLKNSRQVEVSWEYPDTWSTPHS | |
| | YFSLTFCVQVQGKSKREKKDRVFTDKTSATVICRKNASISVRAQDRYYSS | |
| | SWSEWASVPCS | |
| CAT-70-009 | MARPHPWWLCVLGTLVGLSATPAPKSCPERHYWAQGKLCCQMCEPGTFLV | 702 |
| CD27 signal peptide, | KDCDQHRKAAQCDPCIPGVSFSPDHHTRPHCESCRHCNSGLLVRNCTITA | |
| CD27 extracellular | NAECACRNGWQCRDKECTECDPLPNPSLTARSSQALSPHPQPTHLPYVSE | |
| domain, CD27 | MLEARTAGHMQTLADFRQLPARTLSTHWPPQRSLCSSDFIRILVIFSGMF | |
| transmembrane | LVFTLAGALFL [symbol] [symbol] | |
| domain, [symbol] | [symbol] RVKFSRSADAPAYQQGQNQLYNELNLGRREEYDVLDKRRG | |
| [symbol] | RDPEMGGKPRRKNPQEGLYNELQKDKMAEAYSEIGMKGERRRGKGHDGLY | |
| CD3z signaling | QGLSTATKDTYDALHMQALPPRGSGATNFSLLKQAGDVEENPGPRISKPH | |
| domain, P2A, IL-15, | LRSISIQCYLCLLLNSHFLTEAGIHVFILGCFSAGLPKTEANWVNVISDL | |
| P2A, IL-15Rα | KKIEDLIQSMHIDATLYTESDVHPSCKVTAMKCFLLELQVISLESGDASI | |
| | HDTVENLIILANNSLSSNGNVTESGCKECEELEEKNIKEFLQSFVHIVQM | |
| | FINTSGSGATNFSLLKQAGDVEENPGPAPRRARGCRTLGLPALLLLLLLR | |
| | PPATRGITCPPPMSVEHADIWVKSYSLYSRERYICNSGFKRKAGTSSLTE | |
| | CVLNKATNVAHWTTPSLKCIRDPALVHQRPAPPSTVTTAGVTPQPESLSP | |
| | SGKEPAASSPSSNNTAATTAAIVPGSQLMPSKSPSTGTTEISSHESSHGT | |
| | PSQTTAKNWELTASASHQPPGVYPQGHSDTTVAISTSTVLLCGLSAVSLL | |
| | ACYLKSRQTPPLASVEMEAMEALPVTWGTSSRDEDLENCSHHL | |
| CAT-70-010a | MARPHPWWLCVLGTLVGLSATPAPKSCPERHYWAQGKLCCQMCEPGTFLV | 703 |
| CD27 signal peptide, | KDCDQHRKAAQCDPCIPGVSFSPDHHTRPHCESCRHCNSGLLVRNCTITA | |
| CD27 extracellular | NAECACRNGWQCRDKECTECDPLPNPSLTARSSQALSPHPQPTHLPYVSE | |
| domain, CD27 | MLEARTAGHMQTLADFRQLPARTLSTHWPPQRSLCSSDFIRILVIFSGMF | |
| transmembrane | LVFTLAGALFL [symbol] [symbol] | |
| domain, [symbol] | [symbol] RVKFSRSADAPAYQQGQNQLYNELNLGRREEYDVLDKRRG | |
| [symbol] | RDPEMGGKPRRKNPQEGLYNELQKDKMAEAYSEIGMKGERRRGKGHDGLY | |
| CD3z signaling | QGLSTATKDTYDALHMQALPPRGSGATNFSLLKQAGDVEENPGPMGRGLL | |
| domain, P2A, | RGLWPLHIVLWTRIASTIPPHVQKSVNNDMIVTDNNGAVKFPQLCKFCDV | |
| TGFBRII extracellular | RFSTCDNQKSCMSNCSITSICEKPQEVCVAVWRKNDENITLETVCHDPKL | |
| domain, DAP12 | PYHDFILEDAASPKCIMKEKKKPGETFFMCSCSSDECNDNIIFSEEYNTS | |
| signaling domain | NPDLLLVIFQVTGISLLPPLGVAISVIIIFYCYRVNRQQKLSSYFLGRLV | |
| | PRGRGAAEAATRKQRITETESPYQELQGQRSDVYSDLNTQRPYYK | |
| CAT-70-010b | MARPHPWWLCVLGTLVGLSATPAPKSCPERHYWAQGKLCCQMCEPGTFLV | 704 |
| CD27 signal peptide, | KDCDQHRKAAQCDPCIPGVSFSPDHHTRPHCESCRHCNSGLLVRNCTITA | |
| CD27 extracellular | NAECACRNGWQCRDKECTECDPLPNPSLTARSSQALSPHPQPTHLPYVSE | |
| domain, CD27 | MLEARTAGHMQTLADFRQLPARTLSTHWPPQRSLCSSDFIRILVIFSGMF | |
| transmembrane | LVFTLAGALFL [symbol] [symbol] | |
| domain, [symbol] | [symbol] RVKFSRSADAPAYQQGQNQLYNELNLGRREEYDVLDKRRG | |
| [symbol] | RDPEMGGKPRRKNPQEGLYNELQKDKMAEAYSEIGMKGERRRGKGHDGLY | |
| CD3z signaling | QGLSTATKDTYDALHMQALPPRGSGATNFSLLKQAGDVEENPGPMQIPQA | |
| domain, P2A, PD1 | PWPVVWAVLQLGWRPGWFLDSPDRPWNPPTFSPALLVVTEGDNATFTCSF | |
| extracellular domain, | SNTSESFVLNWYRMSPSNQTDKLAAFPEDRSQPGQDCRFRVTQLPNGRDF | |
| DAP12 domain | HMSVVRARRNDSGTYLCGAISLAPKAQIKESLRAELRVTERRAEVPTAHP | |
| | SPSPRPAGQFQTLVVLRPVQAQAQSDCSCSTVSPGVLAGIVMGDLVLTVL | |
| | IALAVYFLGRLVPRGRGAAEAATRKQRITETESPYQELQGQRSDVYSDLN | |
| | TQRPYYK | |
| CAT-CD70-120 | MARPHPWWLCVLGTLVGLSATPAPKSCPERHYWAQGKLCCQMCEPGTFLV | 2598 |
| CD27 signal peptide, | KDCDQHRKAAQCDPCIPGVSFSPDHHTRPHCESCRHCNSGLLVRNCTITA | |
| CD27 extracellular | NAECACRNGWQCRDKECTECDPLPNPSLTARSSQALSPHPQPTHLPYVSE | |
| domain, CD27 | MLEARTAGHMQTLADFRQLPARTLSTHWPPQRSLCSSDFIRILVIFSGMF | |
| transmembrane | LVFTLAGALFL [symbol] [symbol] | |
| domain, [symbol] | [symbol] RVKFSRSADAPAYQQGQNQLYNELNLGRREEYDVLDKRRGRDPEMG | |
| [symbol] | GKPRRKNPQEGLYNELQKDKMAEAYSEIGMKGERRRGKGHDGLYQGLSTA | |
| CD3z signaling | TKDTYDALHMQALPPRGSGATNFSLLKQAGDVEENPGPRISKPHLRSISI | |
| domain, P2A, IL-15 | QCYLCLLLNSHFLTEAGIHVFILGCFSAGLPKTEANWVNVISDLKKIEDL | |
| | IQSMHIDATLYTESDVHPSCKVTAMKCFLLELQVISLESGDASIHDTVEN | |
| | LIILANNSLSSNGNVTESGCKECEELEEKNIKEFLQSFVHIVQMFINTS | |
| CAT-CD70-121 | MARPHPWWLCVLGTLVGLSATPAPKSCPERHYWAQGKLCCQMCEPGTFLV | 2599 |
| CD27 signal peptide, | KDCDQHRKAAQCDPCIPGVSFSPDHHTRPHCESCRHCNSGLLVRNCTITA | |
| CD27 extracellular | NAECACRNGWQCRDKECTECDPLPNPSLTARSSQALSPHPQPTHLPYVSE | |
| domain, CD27 | MLEARTAGHMQTLADFRQLPARTLSTHWPPQRSLCSSDFIRILVIFSGMF | |
| transmembrane | LVFTLAGALFL [symbol] [symbol] | |
| domain, [symbol] | [symbol] RVKFSRSADAPAYQQGQNQLYNELNLGRREEYDVLDKRRGRDPEMG | |
| [symbol] | GKPRRKNPQEGLYNELQKDKMAEAYSEIGMKGERRRGKGHDGLYQGLSTA | |
| CD3z signaling | TKDTYDALHMQALPPRGSGATNFSLLKQAGDVEENPGPAPRRARGCRTLG | |
| domain, P2A, IL- | LPALLLLLLLRPPATRGITCPPPMSVEHADIWVKSYSLYSRERYICNSGF | |
| 15Rα, P2A, IL-15 | KRKAGTSSLTECVLNKATNVAHWTTPSLKCIRDPALVHQRPAPPSTVTTA | |
| | GVTPQPESLSPSGKEPAASSPSSNNTAATTAAIVPGSQLMPSKSPSTGTT | |
| | EISSHESSHGTPSQTTAKNWELTASASHQPPGVYPQGHSDTTVAISTSTV | |
| | LLCGLSAVSLLACYLKSRQTPPLASVEMEAMEALPVTWGTSSRDEDLENC | |
| | SHHLGSGATNFSLLKQAGDVEENPGPRISKPHLRSISIQCYLCLLLNSHF | |
| | LTEAGIHVFILGCFSAGLPKTEANWVNVISDLKKIEDLIQSMHIDATLYT | |
| | ESDVHPSCKVTAMKCFLLELQVISLESGDASIHDTVENLIILANNSLSSN | |
| | GNVTESGCKECEELEEKNIKEFLQSFVHIVQMFINTS | |
| CAT-CD70-128 | MALPVTALLLPLALLLHAARPQVQLVQSGAEVKKPGASVKVSCKASGYTF | 2600 |
| CD8α signal peptide, | TNYGMNWVRQAPGQGLKWMGWINTYTGEPTYADAFKGRVTMTRDTSISTA | |
| CD70 scFv (1F6), | YMELSRLRSDDTAVYYCARDYGDYGMDYWGQGTTVTVSSGGGGSGGGGSG | |
| CD8α hinge, CD8α | GGGSGDIVMTQSPDSLAVSLGERATINCRASKSVSTSGYSFMHWYQQKPG | |
| transmembrane | QPPKLLIYLASNLESGVPDRFSGSGSGTDFTLTISSLQAEDVAVYYCQHS | |
| domain, [symbol] | REVPWTFGQGTKVEIKFVPVFLPAKPTTTPAPRPPTPAPTIASQPLSLRP | |
| [symbol] | EACRPAAGGAVHTRGLDFACDIYIWAPLAGTCGVLLLSLVITLYCNHRN [symbol] | |
| CD3z signaling | [symbol] [symbol] RVKFSRSA | |
| domain, P2A, IL-15 | DAPAYQQGQNQLYNELNLGRREEYDVLDKRRGRDPEMGGKPRRKNPQEGL | |
| | YNELQKDKMAEAYSEIGMKGERRRGKGHDGLYQGLSTATKDTYDALHMQA | |
| | LPPRGSGATNFSLLKQAGDVEENPGPRISKPHLRSISIQCYLCLLLNSHF | |
| | LTEAGIHVFILGCFSAGLPKTEANWVNVISDLKKIEDLIQSMHIDATLYT | |
| | ESDVHPSCKVTAMKCFLLELQVISLESGDASIHDTVENLIILANNSLSSN | |
| | GNVTESGCKECEELEEKNIKEFLQSFVHIVQMFINTS | |
| CAT-CD70-129 | MALPVTALLLPLALLLHAARPQVQLVQSGAEVKKPGASVKVSCKASGYTF | 2601 |
| CD8α signal peptide, | TNYGMNWVRQAPGQGLKWMGWINTYTGEPTYADAFKGRVTMTRDTSISTA | |
| CD70 scFv (1F6), | YMELSRLRSDDTAVYYCARDYGDYGMDYWGQGTTVTVSSGGGGSGGGGSG | |
| CD8α hinge, CD8α | GGGSGDIVMTQSPDSLAVSLGERATINCRASKSVSTSGYSFMHWYQQKPG | |
| transmembrane | QPPKLLIYLASNLESGVPDRFSGSGSGTDFTLTISSLQAEDVAVYYCQHS | |
| domain, [symbol] | REVPWTFGQGTKVEIKFVPVFLPAKPTTTPAPRPPTPAPTIASQPLSLRP | |
| [symbol] | EACRPAAGGAVHTRGLDFACDIYIWAPLAGTCGVLLLSLVITLYCNHRN [symbol] | |
| CD3z signaling | [symbol] [symbol] RVKFSRSA | |
| domain, P2A, IL- | DAPAYQQGQNQLYNELNLGRREEYDVLDKRRGRDPEMGGKPRRKNPQEGL | |
| 15Rα, P2A, IL-15 | YNELQKDKMAEAYSEIGMKGERRRGKGHDGLYQGLSTATKDTYDALHMQA | |
| | LPPRGSGATNFSLLKQAGDVEENPGPAPRRARGCRTLGLPALLLLLLLRP | |
| | PATRGITCPPPMSVEHADIWVKSYSLYSRERYICNSGFKRKAGTSSLTEC | |
| | VLNKATNVAHWTTPSLKCIRDPALVHQRPAPPSTVTTAGVTPQPESLSPS | |
| | GKEPAASSPSSNNTAATTAAIVPGSQLMPSKSPSTGTTEISSHESSHGTP | |
| | SQTTAKNWELTASASHQPPGVYPQGHSDTTVAISTSTVLLCGLSAVSLLA | |
| | CYLKSRQTPPLASVEMEAMEALPVTWGTSSRDEDLENCSHHLGSGATNFS | |
| | LLKQAGDVEENPGPRISKPHLRSISIQCYLCLLLNSHFLTEAGIHVFILG | |
| | CFSAGLPKTEANWVNVISDLKKIEDLIQSMHIDATLYTESDVHPSCKVTA | |
| | MKCFLLELQVISLESGDASIHDTVENLIILANNSLSSNGNVTESGCKECE | |
| | ELEEKNIKEFLQSFVHIVQMFINTS | |
| CAT-CD70-131 | MALPVTALLLPLALLLHAARPQVQLVQSGAEVKKPGASVKVSCKASGYTF | 2602 |
| CD8α signal peptide, | TNYGMNWVRQAPGQGLKWMGWINTYTGEPTYADAFKGRVTMTRDTSISTA | |
| CD70 scFv (1F6), | YMELSRLRSDDTAVYYCARDYGDYGMDYWGQGTTVTVSSGGGGSGGGGSG | |
| IgG1 hinge, CD28 | GGGSGDIVMTQSPDSLAVSLGERATINCRASKSVSTSGYSFMHWYQQKPG | |
| transmembrane | QPPKLLIYLASNLESGVPDRFSGSGSGTDFTLTISSLQAEDVAVYYCQHS | |
| domain, [symbol] | REVPWTEGQGTKVEIKEPKSCDKTHTCPPCPAPELLGGPSVFLFPPKPKD | |
| [symbol] | TLMISRTPEVTCVVVDVSHEDPEVKFNWYVDGVEVHNAKTKPREEQYNST | |
| CD3z signaling | YRVVSVLTVLHQDWLNGKEYKCKVSNKALPAPIEKTISKAKGQPREPQVY | |
| domain, P2A, IL-15 | TLPPSRDELTKNQVSLTCLVKGFYPSDIAVEWESNGQPENNYKTTPPVLD | |
| | SDGSFFLYSKLTVDKSRWQQGNVFSCSVMHEALHNHYTQKSLSLSPGKFW | |
| | VLVVVGGVLACYSLLVTVAFIIFWV [symbol] [symbol] | |
| | [symbol] RVKFSRSADAPAYQQGQNQLYNELNLGRREEYDV | |
| | LDKRRGRDPEMGGKPRRKNPQEGLYNELQKDKMAEAYSEIGMKGERRRGK | |
| | GHDGLYQGLSTATKDTYDALHMQALPPRGSGATNFSLLKQAGDVEENPGP | |
| | RISKPHLRSISIQCYLCLLLNSHFLTEAGIHVFILGCFSAGLPKTEANWV | |
| | NVISDLKKIEDLIQSMHIDATLYTESDVHPSCKVTAMKCFLLELQVISLE | |
| | SGDASIHDTVENLIILANNSLSSNGNVTESGCKECEELEEKNIKEFLQSF | |
| | VHIVQMFINTS | |
| CAT-CD70-132 | MALPVTALLLPLALLLHAARPQVQLVQSGAEVKKPGASVKVSCKASGYTF | 2603 |
| CD8α signal peptide, | TNYGMNWVRQAPGQGLKWMGWINTYTGEPTYADAFKGRVTMTRDTSISTA | |
| CD70 scFv (1F6), | YMELSRLRSDDTAVYYCARDYGDYGMDYWGQGTTVTVSSGGGGSGGGGSG | |
| IgG1 hinge, CD28 | GGGSGDIVMTQSPDSLAVSLGERATINCRASKSVSTSGYSFMHWYQQKPG | |
| transmembrane | QPPKLLIYLASNLESGVPDRFSGSGSGTDFTLTISSLQAEDVAVYYCQHS | |
| domain, [symbol] | REVPWTFGQGTKVEIKEPKSCDKTHTCPPCPAPELLGGPSVFLFPPKPKD | |
| [symbol] | TLMISRTPEVTCVVVDVSHEDPEVKFNWYVDGVEVHNAKTKPREEQYNST | |
| CD3z signaling | YRVVSVLTVLHQDWLNGKEYKCKVSNKALPAPIEKTISKAKGQPREPQVY | |
| domain, P2A, IL- | TLPPSRDELTKNQVSLTCLVKGFYPSDIAVEWESNGQPENNYKTTPPVLD | |
| 15Rα, P2A, IL-15 | SDGSFFLYSKLTVDKSRWQQGNVFSCSVMHEALHNHYTQKSLSLSPGKFW | |
| | VLVVVGGVLACYSLLVTVAFIIFWV [symbol] [symbol] | |
| | [symbol] RVKFSRSADAPAYQQGQNQLYNELNLGRREEYDV | |
| | LDKRRGRDPEMGGKPRRKNPQEGLYNELQKDKMAEAYSEIGMKGERRRGK | |
| | GHDGLYQGLSTATKDTYDALHMQALPPRGSGATNFSLLKQAGDVEENPGP | |
| | APRRARGCRTLGLPALLLLLLLRPPATRGITCPPPMSVEHADIWVKSYSL | |
| | YSRERYICNSGFKRKAGTSSLTECVLNKATNVAHWTTPSLKCIRDPALVH | |
| | QRPAPPSTVTTAGVTPQPESLSPSGKEPAASSPSSNNTAATTAAIVPGSQ | |
| | LMPSKSPSTGTTEISSHESSHGTPSQTTAKNWELTASASHQPPGVYPQGH | |
| | SDTTVAISTSTVLLCGLSAVSLLACYLKSRQTPPLASVEMEAMEALPVTW | |
| | GTSSRDEDLENCSHHLGSGATNFSLLKQAGDVEENPGPRISKPHLRSISI | |
| | QCYLCLLLNSHFLTEAGIHVFILGCFSAGLPKTEANWVNVISDLKKIEDL | |
| | IQSMHIDATLYTESDVHPSCKVTAMKCFLLELQVISLESGDASIHDTVEN | |
| | LIILANNSLSSNGNVTESGCKECEELEEKNIKEFLQSFVHIVQMFINTS | |
| CAT-CD70-210 | MARPHPWWLCVLGTLVGLSATPAPKSCPERHYWAQGKLCCQMCEPGTFLV | 2604 |
| CD27 signal peptide, | KDCDQHRKAAQCDPCIPGVSFSPDHHTRPHCESCRHCNSGLLVRNCTITA | |
| CD27 extracellular | NAECACRNGWQCRDKECTECDPLPNPSLTARSSQALSPHPQPTHLPYVSE | |
| domain, CD27 | MLEARTAGHMQTLADFRQLPARTLSTHWPPQRSLCSSDFIRILVIFSGMF | |
| transmembrane | LVFTLAGALFL [symbol] [symbol] | |
| domain, [symbol] | [symbol] RVKFSRSADAPAYQQGQNQLYNELNLGRREEYDVLDKRRG | |
| [symbol] | RDPEMGGKPRRKNPQEGLYNELQKDKMAEAYSEIGMKGERRRGKGHDGLY | |
| CD3z signaling | QGLSTATKDTYDALHMQALPPRGSGATNFSLLKQAGDVEENPGPRISKPH | |
| domain, P2A, IL-15 | LRSISIQCYLCLLLNSHFLTEAGIHVFILGCFSAGLPKTEANWVNVISDL | |
| | KKIEDLIQSMHIDATLYTESDVHPSCKVTAMKCFLLELQVISLESGDASI | |
| | HDTVENLIILANNSLSSNGNVTESGCKECEELEEKNIKEFLQSFVHIVQM | |
| | FINTS | |
| CAT-CD70-211 | MALPVTALLLPLALLLHAARPQVQLVQSGAEVKKPGASVKVSCKASGYTF | 2605 |
| CD8α signal peptide, | TNYGMNWVRQAPGQGLKWMGWINTYTGEPTYADAFKGRVTMTRDTSISTA | |
| CD70 scFv (1F6), | YMELSRLRSDDTAVYYCARDYGDYGMDYWGQGTTVTVSSGGGGSGGGGSG | |
| CD8α hinge, CD8α | GGGSGDIVMTQSPDSLAVSLGERATINCRASKSVSTSGYSFMHWYQQKPG | |
| transmembrane | QPPKLLIYLASNLESGVPDRFSGSGSGTDFTLTISSLQAEDVAVYYCQHS | |
| domain, [symbol] | REVPWTFGQGTKVEIKFVPVFLPAKPTTTPAPRPPTPAPTIASQPLSLRP | |
| [symbol] | EACRPAAGGAVHTRGLDFACDIYIWAPLAGTCGVLLLSLVITLYCNHRN [symbol] | |
| CD3z signaling | [symbol] [symbol] RVKFSRSADA | |
| domain, P2A, IL-15 | PAYQQGQNQLYNELNLGRREEYDVLDKRRGRDPEMGGKPRRKNPQEGLYN | |
| | ELQKDKMAEAYSEIGMKGERRRGKGHDGLYQGLSTATKDTYDALHMQALP | |
| | PRGSGATNFSLLKQAGDVEENPGPRISKPHLRSISIQCYLCLLLNSHFLT | |
| | EAGIHVFILGCFSAGLPKTEANWVNVISDLKKIEDLIQSMHIDATLYTES | |
| | DVHPSCKVTAMKCFLLELQVISLESGDASIHDTVENLIILANNSLSSNGN | |
| | VTESGCKECEELEEKNIKEFLQSFVHIVQMFINTS | |
| CAT-CD70-212 | MARPHPWWLCVLGTLVGLSATPAPKSCPERHYWAQGKLCCQMCEPGTFLV | 2606 |
| CD27 signal peptide, | KDCDQHRKAAQCDPCIPGVSFSPDHHTRPHCESCRHCNSGLLVRNCTITA | |
| CD27 extracellular | NAECACRNGWQCRDKECTECDPLPNPSLTARSSQALSPHPQPTHLPYVSE | |
| domain, CD27 | MLEARTAGHMQTLADFRQLPARTLSTHWPPQRSLCSSDFIRILVIFSGMF | |
| transmembrane | LVFTLAGALFL [symbol] [symbol] | |
| domain, [symbol] | [symbol] RVKFSRSADAPAYQQGQNQLYNELNLGRREEYDVLDKRRG | |
| [symbol] | RDPEMGGKPRRKNPQEGLYNELQKDKMAEAYSEIGMKGERRRGKGHDGLY | |
| CD3z signaling | QGLSTATKDTYDALHMQALPPRGSGATNFSLLKQAGDVEENPGPAPRRAR | |
| domain, P2A, IL- | GCRTLGLPALLLLLLLRPPATRGITCPPPMSVEHADIWVKSYSLYSRERY | |
| 15Rα, P2A, IL-15 | ICNSGFKRKAGTSSLTECVLNKATNVAHWTTPSLKCIRDPALVHQRPAPP | |
| | STVTTAGVTPQPESLSPSGKEPAASSPSSNNTAATTAAIVPGSQLMPSKS | |
| | PSTGTTEISSHESSHGTPSQTTAKNWELTASASHQPPGVYPQGHSDTTVA | |
| | ISTSTVLLCGLSAVSLLACYLKSRQTPPLASVEMEAMEALPVTWGTSSRD | |
| | EDLENCSHHLGSGATNFSLLKQAGDVEENPGPRISKPHLRSISIQCYLCL | |
| | LLNSHFLTEAGIHVFILGCFSAGLPKTEANWVNVISDLKKIEDLIQSMHI | |
| | DATLYTESDVHPSCKVTAMKCFLLELQVISLESGDASIHDTVENLIILAN | |
| | NSLSSNGNVTESGCKECEELEEKNIKEFLQSFVHIVQMFINTS | |
| CAT-CD70-213 | MALPVTALLLPLALLLHAARPQVQLVQSGAEVKKPGASVKVSCKASGYTF | 2607 |
| CD8α signal peptide, | TNYGMNWVRQAPGQGLKWMGWINTYTGEPTYADAFKGRVTMTRDTSISTA | |
| CD70 scFv (1F6), | YMELSRLRSDDTAVYYCARDYGDYGMDYWGQGTTVTVSSGGGGSGGGGSG | |
| CD8α hinge, CD8α | GGGSGDIVMTQSPDSLAVSLGERATINCRASKSVSTSGYSFMHWYQQKPG | |
| transmembrane | QPPKLLIYLASNLESGVPDRFSGSGSGTDFTLTISSLQAEDVAVYYCQHS | |
| domain, [symbol] | REVPWTFGQGTKVEIKFVPVFLPAKPTTTPAPRPPTPAPTIASQPLSLRP | |
| [symbol] | EACRPAAGGAVHTRGLDFACDIYIWAPLAGTCGVLLLSLVITLYCNHRN [symbol] | |
| CD3z signaling | [symbol] [symbol] RVKFSRSADA | |
| domain, P2A, IL- | PAYQQGQNQLYNELNLGRREEYDVLDKRRGRDPEMGGKPRRKNPQEGLYN | |
| 15Rα, P2A, IL-15 | ELQKDKMAEAYSEIGMKGERRRGKGHDGLYQGLSTATKDTYDALHMQALP | |
| | PRGSGATNFSLLKQAGDVEENPGPAPRRARGCRTLGLPALLLLLLLRPPA | |
| | TRGITCPPPMSVEHADIWVKSYSLYSRERYICNSGFKRKAGTSSLTECVL | |
| | NKATNVAHWTTPSLKCIRDPALVHQRPAPPSTVTTAGVTPQPESLSPSGK | |
| | EPAASSPSSNNTAATTAAIVPGSQLMPSKSPSTGTTEISSHESSHGTPSQ | |
| | TTAKNWELTASASHQPPGVYPQGHSDTTVAISTSTVLLCGLSAVSLLACY | |
| | LKSRQTPPLASVEMEAMEALPVTWGTSSRDEDLENCSHHLGSGATNFSLL | |
| | KQAGDVEENPGPRISKPHLRSISIQCYLCLLLNSHFLTEAGIHVFILGCF | |
| | SAGLPKTEANWVNVISDLKKIEDLIQSMHIDATLYTESDVHPSCKVTAMK | |
| | CFLLELQVISLESGDASIHDTVENLIILANNSLSSNGNVTESGCKECEEL | |
| | EEKNIKEFLQSFVHIVQMFINTS | |
| CAT-CD70-214 | MARPHPWWLCVLGTLVGLSATPAPKSCPERHYWAQGKLCCQMCEPGTFLV | 2608 |
| CD27 signal peptide, | KDCDQHRKAAQCDPCIPGVSFSPDHHTRPHCESCRHCNSGLLVRNCTITA | |
| CD27 extracellular | NAECACRNGWQCRDKECTECDPLPNPSLTARSSQALSPHPQPTHLPYVSE | |
| domain, CD27 | MLEARTAGHMQTLADFRQLPARTLSTHWPPQRSLCSSDFIRILVIFSGMF | |
| transmembrane | LVFTLAGALFL [symbol] [symbol] | |
| domain, [symbol] | [symbol] RVKFSRSADAPAYQQGQNQLYNELNLGRREEYDVLDKRRG | |
| [symbol] | RDPEMGGKPRRKNPQEGLYNELQKDKMAEAYSEIGMKGERRRGKGHDGLY | |
| CD3z signaling | QGLSTATKDTYDALHMQALPPRGSGATNFSLLKQAGDVEENPGPMCPARS | |
| domain, P2A, mbIL12 | LLLVATLVLLDHLSLARNLPVATPDPGMFPCLHHSQNLLRAVSNMLQKAR | |
| | QTLEFYPCTSEEIDHEDITKDKTSTVEACLPLELTKNESCLNSRETSFIT | |
| | NGSCLASRKTSFMMALCLSSIYEDLKMYQVEFKTMNAKLLMDPKRQIFLD | |
| | QNMLAVIDELMQALNFNSETVPQKSSLEEPDFYKTKIKLCILLHAFRIRA | |
| | VTIDRVMSYLNASGSGSGSGSGSGSGSGSGSGSGSGSGSGSGSVAISTST | |
| | VLLCGLSAVSLLACYLKSRQTPPLASVEMEAMEALPVTWGTSSRDEDLEN | |
| | CSHHLGSGATNFSLLKQAGDVEENPGPMCHQQLVISWFSLVFLASPLVAI | |
| | WELKKDVYVVELDWYPDAPGEMVVLTCDTPEEDGITWTLDQSSEVLGSGK | |
| | TLTIQVKEFGDAGQYTCHKGGEVLSHSLLLLHKKEDGIWSTDILKDQKEP | |
| | KNKTFLRCEAKNYSGRFTCWWLTTISTDLTFSVKSSRGSSDPQGVTCGAA | |
| | TLSAERVRGDNKEYEYSVECQEDSACPAAEESLPIEVMVDAVHKLKYENY | |
| | TSSFFIRDIIKPDPPKNLQLKPLKNSRQVEVSWEYPDTWSTPHSYFSLTF | |
| | CVQVQGKSKREKKDRVFTDKTSATVICRKNASISVRAQDRYYSSSWSEWA | |
| | SVPCS | |
| CAT-CD70-215 | MARPHPWWLCVLGTLVGLSATPAPKSCPERHYWAQGKLCCQMCEPGTFLV | 2609 |
| CD27 signal peptide, | KDCDQHRKAAQCDPCIPGVSFSPDHHTRPHCESCRHCNSGLLVRNCTITA | |
| CD27 extracellular | NAECACRNGWQCRDKECTECDPLPNPSLTARSSQALSPHPQPTHLPYVSE | |
| domain, CD27 | MLEARTAGHMQTLADFRQLPARTLSTHWPPQRSLCSSDFIRILVIFSGMF | |
| transmembrane | LVFTLAGALFL [symbol] [symbol] | |
| domain, [symbol] | [symbol] RVKFSRSADAPAYQQGQNQLYNELNLGRREEYDVLDKRRGRDPEMG | |
| [symbol] | GKPRRKNPQEGLYNELQKDKMAEAYSEIGMKGERRRGKGHDGLYQGLSTA | |
| CD3z signaling | TKDTYDALHMQALPPRGSGATNFSLLKQAGDVEENPGPMCPARSLLLVAT | |
| domain, P2A, mbIL12 | LVLLDHLSLARNLPVATPDPGMFPCLHHSQNLLRAVSNMLQKARQTLEFY | |
| | PCTSEEIDHEDITKDKTSTVEACLPLELTKNESCLNSRETSFITNGSCLA | |
| | SRKTSFMMALCLSSIYEDLKMYQVEFKTMNAKLLMDPKRQIFLDQNMLAV | |
| | IDELMQALNFNSETVPQKSSLEEPDFYKTKIKLCILLHAFRIRAVTIDRV | |
| | MSYLNASGSGSGSGSGSGSGSGSGSGSGSGSGSGSGSVAISTSTVLLCGL | |
| | SAVSLLACYLKSRQTPPLASVEMEAMEALPVTWGTSSRDEDLENCSHHLG | |
| | SGATNFSLLKQAGDVEENPGPMCHQQLVISWFSLVFLASPLVAIWELKKD | |
| | VYVVELDWYPDAPGEMVVLTCDTPEEDGITWTLDQSSEVLGSGKTLTIQV | |
| | KEFGDAGQYTCHKGGEVLSHSLLLLHKKEDGIWSTDILKDQKEPKNKTFL | |
| | RCEAKNYSGRFTCWWLTTISTDLTFSVKSSRGSSDPQGVTCGAATLSAER | |
| | VRGDNKEYEYSVECQEDSACPAAEESLPIEVMVDAVHKLKYENYTSSFFI | |
| | RDIIKPDPPKNLQLKPLKNSRQVEVSWEYPDTWSTPHSYFSLTFCVQVQG | |
| | KSKREKKDRVFTDKTSATVICRKNASISVRAQDRYYSSSWSEWASVPCS | |
| CAT-CD70-216 | MALPVTALLLPLALLLHAARPQVQLVQSGAEVKKPGASVKVSCKASGYTF | 2610 |
| CD8α signal peptide, | TNYGMNWVRQAPGQGLKWMGWINTYTGEPTYADAFKGRVTMTRDTSISTA | |
| CD70 scFv (1F6), | YMELSRLRSDDTAVYYCARDYGDYGMDYWGQGTTVTVSSGGGGSGGGGSG | |
| CD8α hinge, CD8α | GGGSGDIVMTQSPDSLAVSLGERATINCRASKSVSTSGYSFMHWYQQKPG | |
| transmembrane | QPPKLLIYLASNLESGVPDRFSGSGSGTDFTLTISSLQAEDVAVYYCQHS | |
| domain, [symbol] | REVPWTFGQGTKVEIKFVPVFLPAKPTTTPAPRPPTPAPTIASQPLSLRP | |
| [symbol] | EACRPAAGGAVHTRGLDFACDIYIWAPLAGTCGVLLLSLVITLYCNHRN [symbol] | |
| CD3z signaling | [symbol] [symbol] RVKFSRSADA | |
| domain, P2A, mbIL12 | PAYQQGQNQLYNELNLGRREEYDVLDKRRGRDPEMGGKPRRKNPQEGLYN | |
| | ELQKDKMAEAYSEIGMKGERRRGKGHDGLYQGLSTATKDTYDALHMQALP | |
| | PRGSGATNFSLLKQAGDVEENPGPMCPARSLLLVATLVLLDHLSLARNLP | |
| | VATPDPGMFPCLHHSQNLLRAVSNMLQKARQTLEFYPCTSEEIDHEDITK | |
| | DKTSTVEACLPLELTKNESCLNSRETSFITNGSCLASRKTSFMMALCLSS | |
| | IYEDLKMYQVEFKTMNAKLLMDPKRQIFLDQNMLAVIDELMQALNFNSET | |
| | VPQKSSLEEPDFYKTKIKLCILLHAFRIRAVTIDRVMSYLNASGSGSGSG | |
| | SGSGSGSGSGSGSGSGSGSGSGSVAISTSTVLLCGLSAVSLLACYLKSRQ | |
| | TPPLASVEMEAMEALPVTWGTSSRDEDLENCSHHLGSGATNFSLLKQAGD | |
| | VEENPGPMCHQQLVISWFSLVFLASPLVAIWELKKDVYVVELDWYPDAPG | |
| | EMVVLTCDTPEEDGITWTLDQSSEVLGSGKTLTIQVKEFGDAGQYTCHKG | |
| | GEVLSHSLLLLHKKEDGIWSTDILKDQKEPKNKTFLRCEAKNYSGRFTCW | |
| | WLTTISTDLTFSVKSSRGSSDPQGVTCGAATLSAERVRGDNKEYEYSVEC | |
| | QEDSACPAAEESLPIEVMVDAVHKLKYENYTSSFFIRDIIKPDPPKNLQL | |
| | KPLKNSRQVEVSWEYPDTWSTPHSYFSLTFCVQVQGKSKREKKDRVFTDK | |
| | TSATVICRKNASISVRAQDRYYSSSWSEWASVPCS | |
| CAT-CD70-217 | MALPVTALLLPLALLLHAARPQVQLVQSGAEVKKPGASVKVSCKASGYTF | 2611 |
| CD8α signal peptide, | TNYGMNWVRQAPGQGLKWMGWINTYTGEPTYADAFKGRVTMTRDTSISTA | |
| CD70 scFv (1F6), | YMELSRLRSDDTAVYYCARDYGDYGMDYWGQGTTVTVSSGGGGSGGGGSG | |
| CD8α hinge, CD8α | GGGSGDIVMTQSPDSLAVSLGERATINCRASKSVSTSGYSFMHWYQQKPG | |
| transmembrane | QPPKLLIYLASNLESGVPDRFSGSGSGTDFTLTISSLQAEDVAVYYCQHS | |
| domain, [symbol] | REVPWTFGQGTKVEIKFVPVFLPAKPTTTPAPRPPTPAPTIASQPLSLRP | |
| [symbol] | EACRPAAGGAVHTRGLDFACDIYIWAPLAGTCGVLLLSLVITLYCNHRN [symbol] | |
| CD3z signaling | [symbol] [symbol] RVKFSRSA | |
| domain, P2A, mbIL12 | DAPAYQQGQNQLYNELNLGRREEYDVLDKRRGRDPEMGGKPRRKNPQEGL | |
| | YNELQKDKMAEAYSEIGMKGERRRGKGHDGLYQGLSTATKDTYDALHMQA | |
| | LPPRGSGATNFSLLKQAGDVEENPGPMCPARSLLLVATLVLLDHLSLARN | |
| | LPVATPDPGMFPCLHHSQNLLRAVSNMLQKARQTLEFYPCTSEEIDHEDI | |
| | TKDKTSTVEACLPLELTKNESCLNSRETSFITNGSCLASRKTSFMMALCL | |
| | SSIYEDLKMYQVEFKTMNAKLLMDPKRQIFLDQNMLAVIDELMQALNFNS | |
| | ETVPQKSSLEEPDFYKTKIKLCILLHAFRIRAVTIDRVMSYLNASGSGSG | |
| | SGSGSGSGSGSGSGSGSGSGSGSGSVAISTSTVLLCGLSAVSLLACYLKS | |
| | RQTPPLASVEMEAMEALPVTWGTSSRDEDLENCSHHLGSGATNFSLLKQA | |
| | GDVEENPGPMCHQQLVISWFSLVFLASPLVAIWELKKDVYVVELDWYPDA | |
| | PGEMVVLTCDTPEEDGITWTLDQSSEVLGSGKTLTIQVKEFGDAGQYTCH | |
| | KGGEVLSHSLLLLHKKEDGIWSTDILKDQKEPKNKTFLRCEAKNYSGRFT | |
| | CWWLTTISTDLTFSVKSSRGSSDPQGVTCGAATLSAERVRGDNKEYEYSV | |
| | ECQEDSACPAAEESLPIEVMVDAVHKLKYENYTSSFFIRDIIKPDPPKNL | |
| | QLKPLKNSRQVEVSWEYPDTWSTPHSYFSLTFCVQVQGKSKREKKDRVFT | |
| | DKTSATVICRKNASISVRAQDRYYSSSWSEWASVPCS | |
| CAT-CD70-218 | MALPVTALLLPLALLLHAARPQVQLVQSGAEVKKPGASVKVSCKASGYTF | 2612 |
| CD8α signal peptide, | TNYGMNWVRQAPGQGLKWMGWINTYTGEPTYADAFKGRVTMTRDTSISTA | |
| CD70 scFv (1F6), | YMELSRLRSDDTAVYYCARDYGDYGMDYWGQGTTVTVSSGGGGSGGGGSG | |
| IgG1 hinge, CD28 | GGGSGDIVMTQSPDSLAVSLGERATINCRASKSVSTSGYSFMHWYQQKPG | |
| transmembrane | QPPKLLIYLASNLESGVPDRFSGSGSGTDFTLTISSLQAEDVAVYYCQHS | |
| domain, [symbol] | REVPWTEGQGTKVEIKEPKSCDKTHTCPPCPAPELLGGPSVFLFPPKPKD | |
| [symbol] | TLMISRTPEVTCVVVDVSHEDPEVKFNWYVDGVEVHNAKTKPREEQYNST | |
| CD3z signaling | YRVVSVLTVLHQDWLNGKEYKCKVSNKALPAPIEKTISKAKGQPREPQVY | |
| domain, P2A, mbIL12 | TLPPSRDELTKNQVSLTCLVKGFYPSDIAVEWESNGQPENNYKTTPPVLD | |
| | SDGSFFLYSKLTVDKSRWQQGNVFSCSVMHEALHNHYTQKSLSLSPGKFW | |
| | VLVVVGGVLACYSLLVTVAFIIFWV [symbol] | |
| | [symbol] RVKFSRSADAPAYQQGQNQLYNELNLGRREEYDV | |
| | LDKRRGRDPEMGGKPRRKNPQEGLYNELQKDKMAEAYSEIGMKGERRRGK | |
| | GHDGLYQGLSTATKDTYDALHMQALPPRGSGATNFSLLKQAGDVEENPGP | |
| | MCPARSLLLVATLVLLDHLSLARNLPVATPDPGMFPCLHHSQNLLRAVSN | |
| | MLQKARQTLEFYPCTSEEIDHEDITKDKTSTVEACLPLELTKNESCLNSR | |
| | ETSFITNGSCLASRKTSFMMALCLSSIYEDLKMYQVEFKTMNAKLLMDPK | |
| | RQIFLDQNMLAVIDELMQALNFNSETVPQKSSLEEPDFYKTKIKLCILLH | |
| | AFRIRAVTIDRVMSYLNASGSGSGSGSGSGSGSGSGSGSGSGSGSGSGSV | |
| | AISTSTVLLCGLSAVSLLACYLKSRQTPPLASVEMEAMEALPVTWGTSSR | |
| | DEDLENCSHHLGSGATNFSLLKQAGDVEENPGPMCHQQLVISWFSLVFLA | |
| | SPLVAIWELKKDVYVVELDWYPDAPGEMVVLTCDTPEEDGITWTLDQSSE | |
| | VLGSGKTLTIQVKEFGDAGQYTCHKGGEVLSHSLLLLHKKEDGIWSTDIL | |
| | KDQKEPKNKTFLRCEAKNYSGRFTCWWLTTISTDLTFSVKSSRGSSDPQG | |
| | VTCGAATLSAERVRGDNKEYEYSVECQEDSACPAAEESLPIEVMVDAVHK | |
| | LKYENYTSSFFIRDIIKPDPPKNLQLKPLKNSRQVEVSWEYPDTWSTPHS | |
| | YFSLTFCVQVQGKSKREKKDRVFTDKTSATVICRKNASISVRAQDRYYSS | |
| | SWSEWASVPCS | |
| CAT-CD70-219 | MARPHPWWLCVLGTLVGLSATPAPKSCPERHYWAQGKLCCQMCEPGTFLV | 2613 |
| CD27 signal peptide, | KDCDQHRKAAQCDPCIPGVSFSPDHHTRPHCESCRHCNSGLLVRNCTITA | |
| CD27 extracellular | NAECACRNGWQCRDKECTECDPLPNPSLTARSSQALSPHPQPTHLPYVSE | |
| domain, CD27 | MLEARTAGHMQTLADFRQLPARTLSTHWPPQRSLCSSDFIRILVIFSGMF | |
| transmembrane | LVFTLAGALFL [symbol] [symbol] | |
| domain, [symbol] | [symbol] RVKFSRSADAPAYQQGQNQLYNELNLGRREEYDVLDKRRG | |
| [symbol] | RDPEMGGKPRRKNPQEGLYNELQKDKMAEAYSEIGMKGERRRGKGHDGLY | |
| CD3z signaling | QGLSTATKDTYDALHMQALPPRGSGATNFSLLKQAGDVEENPGPAAEPVE | |
| domain, P2A, IL18 | DNCINFVAMKFIDNTLYFIAEDDENLESDYFGKLESKLSVIRNLNDQVLF | |
| | IDQGNRPLFEDMTDSDCRDNAPRTIFIISMYKDSQPRGMAVTISVKCEKI | |
| | STLSCENKIISFKEMNPPDNIKDTKSDIIFFQRSVPGHDNKMQFESSSYE | |
| | GYFLACEKERDLFKLILKKEDELGDRSIMFTVQNED | |
| CAT-CD70-220 | MARPHPWWLCVLGTLVGLSATPAPKSCPERHYWAQGKLCCQMCEPGTFLV | 2614 |
| CD27 signal peptide, | KDCDQHRKAAQCDPCIPGVSFSPDHHTRPHCESCRHCNSGLLVRNCTITA | |
| CD27 extracellular | NAECACRNGWQCRDKECTECDPLPNPSLTARSSQALSPHPQPTHLPYVSE | |
| domain, CD27 | MLEARTAGHMQTLADFRQLPARTLSTHWPPQRSLCSSDFIRILVIFSGMF | |
| transmembrane | LVFTLAGALFL [symbol] [symbol] | |
| domain, [symbol] | [symbol] RVKFSRSADAPAYQQGQNQLYNELNLGRREEYDVLDKRRGRDPEMG | |
| [symbol] | GKPRRKNPQEGLYNELQKDKMAEAYSEIGMKGERRRGKGHDGLYQGLSTA | |
| CD3z signaling | TKDTYDALHMQALPPRGSGATNFSLLKQAGDVEENPGPAAEPVEDNCINF | |
| domain, P2A, IL18 | VAMKFIDNTLYFIAEDDENLESDYFGKLESKLSVIRNLNDQVLFIDQGNR | |
| | PLFEDMTDSDCRDNAPRTIFIISMYKDSQPRGMAVTISVKCEKISTLSCE | |
| | NKIISFKEMNPPDNIKDTKSDIIFFQRSVPGHDNKMQFESSSYEGYFLAC | |
| | EKERDLFKLILKKEDELGDRSIMFTVQNED | |
| CAT-CD70-221 | MALPVTALLLPLALLLHAARPQVQLVQSGAEVKKPGASVKVSCKASGYTF | 2615 |
| CD8α signal peptide, | TNYGMNWVRQAPGQGLKWMGWINTYTGEPTYADAFKGRVTMTRDTSISTA | |
| CD70 scFv (1F6), | YMELSRLRSDDTAVYYCARDYGDYGMDYWGQGTTVTVSSGGGGSGGGGSG | |
| CD8α hinge, CD8α | GGGSGDIVMTQSPDSLAVSLGERATINCRASKSVSTSGYSFMHWYQQKPG | |
| transmembrane | QPPKLLIYLASNLESGVPDRFSGSGSGTDFTLTISSLQAEDVAVYYCQHS | |
| domain, [symbol] | REVPWTFGQGTKVEIKFVPVFLPAKPTTTPAPRPPTPAPTIASQPLSLRP | |
| [symbol] | EACRPAAGGAVHTRGLDFACDIYIWAPLAGTCGVLLLSLVITLYCNHRN [symbol] | |
| CD3z signaling | [symbol] [symbol] RVKFSRSADA | |
| domain, P2A, IL18 | PAYQQGQNQLYNELNLGRREEYDVLDKRRGRDPEMGGKPRRKNPQEGLYN | |
| | ELQKDKMAEAYSEIGMKGERRRGKGHDGLYQGLSTATKDTYDALHMQALP | |
| | PRGSGATNFSLLKQAGDVEENPGPAAEPVEDNCINFVAMKFIDNTLYFIA | |
| | EDDENLESDYFGKLESKLSVIRNLNDQVLFIDQGNRPLFEDMTDSDCRDN | |
| | APRTIFIISMYKDSQPRGMAVTISVKCEKISTLSCENKIISFKEMNPPDN | |
| | IKDTKSDIIFFQRSVPGHDNKMQFESSSYEGYFLACEKERDLFKLILKKE | |
| | DELGDRSIMFTVQNED | |
| CAT-CD70-222 | MALPVTALLLPLALLLHAARPQVQLVQSGAEVKKPGASVKVSCKASGYTF | 2616 |
| CD8α signal peptide, | TNYGMNWVRQAPGQGLKWMGWINTYTGEPTYADAFKGRVTMTRDTSISTA | |
| CD70 scFv (1F6), | YMELSRLRSDDTAVYYCARDYGDYGMDYWGQGTTVTVSSGGGGSGGGGSG | |
| CD8α hinge, CD8α | GGGSGDIVMTQSPDSLAVSLGERATINCRASKSVSTSGYSFMHWYQQKPG | |
| transmembrane | QPPKLLIYLASNLESGVPDRFSGSGSGTDFTLTISSLQAEDVAVYYCQHS | |
| domain, [symbol] | REVPWTFGQGTKVEIKFVPVFLPAKPTTTPAPRPPTPAPTIASQPLSLRP | |
| [symbol] | EACRPAAGGAVHTRGLDFACDIYIWAPLAGTCGVLLLSLVITLYCNHRN [symbol] | |
| CD3z signaling | [symbol] [symbol] RVKFSRSA | |
| domain, P2A, IL18 | DAPAYQQGQNQLYNELNLGRREEYDVLDKRRGRDPEMGGKPRRKNPQEGL | |
| | YNELQKDKMAEAYSEIGMKGERRRGKGHDGLYQGLSTATKDTYDALHMQA | |
| | LPPRGSGATNFSLLKQAGDVEENPGPAAEPVEDNCINFVAMKFIDNTLYF | |
| | IAEDDENLESDYFGKLESKLSVIRNLNDQVLFIDQGNRPLFEDMTDSDCR | |
| | DNAPRTIFIISMYKDSQPRGMAVTISVKCEKISTLSCENKIISFKEMNPP | |
| | DNIKDTKSDIIFFQRSVPGHDNKMQFESSSYEGYFLACEKERDLFKLILK | |
| | KEDELGDRSIMFTVQNED | |
| CAT-CD70-223 | MALPVTALLLPLALLLHAARPQVQLVQSGAEVKKPGASVKVSCKASGYTF | 2617 |
| CD8α signal peptide, | TNYGMNWVRQAPGQGLKWMGWINTYTGEPTYADAFKGRVTMTRDTSISTA | |
| CD70 scFv (1F6), | YMELSRLRSDDTAVYYCARDYGDYGMDYWGQGTTVTVSSGGGGSGGGGSG | |
| IgG1 hinge, CD28 | GGGSGDIVMTQSPDSLAVSLGERATINCRASKSVSTSGYSFMHWYQQKPG | |
| transmembrane | QPPKLLIYLASNLESGVPDRFSGSGSGTDFTLTISSLQAEDVAVYYCQHS | |
| domain, [symbol] | REVPWTFGQGTKVEIKEPKSCDKTHTCPPCPAPELLGGPSVFLFPPKPKD | |
| [symbol] | TLMISRTPEVTCVVVDVSHEDPEVKFNWYVDGVEVHNAKTKPREEQYNST | |
| CD3z signaling | YRVVSVLTVLHQDWLNGKEYKCKVSNKALPAPIEKTISKAKGQPREPQVY | |
| domain, P2A, IL18 | TLPPSRDELTKNQVSLTCLVKGFYPSDIAVEWESNGQPENNYKTTPPVLD | |
| | SDGSFFLYSKLTVDKSRWQQGNVFSCSVMHEALHNHYTQKSLSLSPGKFW | |
| | VLVVVGGVLACYSLLVTVAFIIFWV [symbol] [symbol] | |
| | [symbol] RVKFSRSADAPAYQQGQNQLYNELNLGRREEYDV | |
| | LDKRRGRDPEMGGKPRRKNPQEGLYNELQKDKMAEAYSEIGMKGERRRGK | |
| | GHDGLYQGLSTATKDTYDALHMQALPPRGSGATNFSLLKQAGDVEENPGP | |
| | AAEPVEDNCINFVAMKFIDNTLYFIAEDDENLESDYFGKLESKLSVIRNL | |
| | NDQVLFIDQGNRPLFEDMTDSDCRDNAPRTIFIISMYKDSQPRGMAVTIS | |
| | VKCEKISTLSCENKIISFKEMNPPDNIKDTKSDIIFFQRSVPGHDNKMQF | |
| | ESSSYEGYFLACEKERDLFKLILKKEDELGDRSIMFTVQNED | |
| CAT-CD70-224 | MARPHPWWLCVLGTLVGLSATPAPKSCPERHYWAQGKLCCQMCEPGTFLV | 2618 |
| CD27 signal peptide, | KDCDQHRKAAQCDPCIPGVSFSPDHHTRPHCESCRHCNSGLLVRNCTITA | |
| CD27 extracellular | NAECACRNGWQCRDKECTECDPLPNPSLTARSSQALSPHPQPTHLPYVSE | |
| domain, CD27 | MLEARTAGHMQTLADFRQLPARTLSTHWPPQRSLCSSDFIRILVIFSGMF | |
| transmembrane | LVFTLAGALFL [symbol] [symbol] | |
| domain, [symbol] | [symbol] RVKFSRSADAPAYQQGQNQLYNELNLGRREEYDVLDKRRG | |
| [symbol] | RDPEMGGKPRRKNPQEGLYNELQKDKMAEAYSEIGMKGERRRGKGHDGLY | |
| CD3z signaling | QGLSTATKDTYDALHMQALPPRGSGATNFSLLKQAGDVEENPGPRSSPGN | |
| domain, P2A, IL21 | MERIVICLMVIFLGTLVHKSSSQGQDRHMIRMRQLIDIVDQLKNYVNDLV | |
| | PEFLPAPEDVETNCEWSAFSCFQKAQLKSANTGNNERIINVSIKKLKRKP | |
| | PSTNAGRRQKHRLTCPSCDSYEKKPPKEFLERFKSLLQKMIHQHLSSRTH | |
| | GSEDS | |
| CAT-CD70-225 | MARPHPWWLCVLGTLVGLSATPAPKSCPERHYWAQGKLCCQMCEPGTFLV | 2619 |
| CD27 signal peptide, | KDCDQHRKAAQCDPCIPGVSFSPDHHTRPHCESCRHCNSGLLVRNCTITA | |
| CD27 extracellular | NAECACRNGWQCRDKECTECDPLPNPSLTARSSQALSPHPQPTHLPYVSE | |
| domain, CD27 | MLEARTAGHMQTLADFRQLPARTLSTHWPPQRSLCSSDFIRILVIFSGMF | |
| transmembrane | LVFTLAGALFL [symbol] [symbol] | |
| domain, [symbol] | [symbol] RVKFSRSADAPAYQQGQNQLYNELNLGRREEYDVLDKRRGRDPEMG | |
| [symbol] | GKPRRKNPQEGLYNELQKDKMAEAYSEIGMKGERRRGKGHDGLYQGLSTA | |
| CD3z signaling | TKDTYDALHMQALPPRGSGATNFSLLKQAGDVEENPGPRSSPGNMERIVI | |
| domain, P2A, IL21 | CLMVIFLGTLVHKSSSQGQDRHMIRMRQLIDIVDQLKNYVNDLVPEFLPA | |
| | PEDVETNCEWSAFSCFQKAQLKSANTGNNERIINVSIKKLKRKPPSTNAG | |
| | RRQKHRLTCPSCDSYEKKPPKEFLERFKSLLQKMIHQHLSSRTHGSEDS | |
| CAT-CD70-226 | MALPVTALLLPLALLLHAARPQVQLVQSGAEVKKPGASVKVSCKASGYTF | 2620 |
| CD8α signal peptide, | TNYGMNWVRQAPGQGLKWMGWINTYTGEPTYADAFKGRVTMTRDTSISTA | |
| CD70 scFv (1F6), | YMELSRLRSDDTAVYYCARDYGDYGMDYWGQGTTVTVSSGGGGSGGGGSG | |
| CD8α hinge, CD8α | GGGSGDIVMTQSPDSLAVSLGERATINCRASKSVSTSGYSFMHWYQQKPG | |
| transmembrane | QPPKLLIYLASNLESGVPDRFSGSGSGTDFTLTISSLQAEDVAVYYCQHS | |
| domain, [symbol] | REVPWTFGQGTKVEIKFVPVFLPAKPTTTPAPRPPTPAPTIASQPLSLRP | |
| [symbol] | EACRPAAGGAVHTRGLDFACDIYIWAPLAGTCGVLLLSLVITLYCNHRN [symbol] | |
| CD3z signaling | [symbol] [symbol] RVKFSRSADA | |
| domain, P2A, IL21 | PAYQQGQNQLYNELNLGRREEYDVLDKRRGRDPEMGGKPRRKNPQEGLYN | |
| | ELQKDKMAEAYSEIGMKGERRRGKGHDGLYQGLSTATKDTYDALHMQALP | |
| | PRGSGATNFSLLKQAGDVEENPGPRSSPGNMERIVICLMVIFLGTLVHKS | |
| | SSQGQDRHMIRMRQLIDIVDQLKNYVNDLVPEFLPAPEDVETNCEWSAFS | |
| | CFQKAQLKSANTGNNERIINVSIKKLKRKPPSTNAGRRQKHRLTCPSCDS | |
| | YEKKPPKEFLERFKSLLQKMIHQHLSSRTHGSEDS | |
| CAT-CD70-227 | MALPVTALLLPLALLLHAARPQVQLVQSGAEVKKPGASVKVSCKASGYTF | 2621 |
| CD8α signal peptide, | TNYGMNWVRQAPGQGLKWMGWINTYTGEPTYADAFKGRVTMTRDTSISTA | |
| CD70 scFv (1F6), | YMELSRLRSDDTAVYYCARDYGDYGMDYWGQGTTVTVSSGGGGSGGGGSG | |
| CD8α hinge, CD8α | GGGSGDIVMTQSPDSLAVSLGERATINCRASKSVSTSGYSFMHWYQQKPG | |
| transmembrane | QPPKLLIYLASNLESGVPDRFSGSGSGTDFTLTISSLQAEDVAVYYCQHS | |
| domain, [symbol] | REVPWTFGQGTKVEIKFVPVFLPAKPTTTPAPRPPTPAPTIASQPLSLRP | |
| [symbol] | EACRPAAGGAVHTRGLDFACDIYIWAPLAGTCGVLLLSLVITLYCNHRN [symbol] | |
| CD3z signaling | [symbol] [symbol] RVKFSRSA | |
| domain, P2A, IL21 | DAPAYQQGQNQLYNELNLGRREEYDVLDKRRGRDPEMGGKPRRKNPQEGL | |
| | YNELQKDKMAEAYSEIGMKGERRRGKGHDGLYQGLSTATKDTYDALHMQA | |
| | LPPRGSGATNFSLLKQAGDVEENPGPRSSPGNMERIVICLMVIFLGTLVH | |
| | KSSSQGQDRHMIRMRQLIDIVDQLKNYVNDLVPEFLPAPEDVETNCEWSA | |
| | FSCFQKAQLKSANTGNNERIINVSIKKLKRKPPSTNAGRRQKHRLTCPSC | |
| | DSYEKKPPKEFLERFKSLLQKMIHQHLSSRTHGSEDS | |
| CAT-CD70-228 | MALPVTALLLPLALLLHAARPQVQLVQSGAEVKKPGASVKVSCKASGYTF | 2622 |
| CD8α signal peptide, | TNYGMNWVRQAPGQGLKWMGWINTYTGEPTYADAFKGRVTMTRDTSISTA | |
| CD70 scFv (1F6), | YMELSRLRSDDTAVYYCARDYGDYGMDYWGQGTTVTVSSGGGGSGGGGSG | |
| IgG1 hinge, CD28 | GGGSGDIVMTQSPDSLAVSLGERATINCRASKSVSTSGYSFMHWYQQKPG | |
| transmembrane | QPPKLLIYLASNLESGVPDRFSGSGSGTDFTLTISSLQAEDVAVYYCQHS | |
| domain [symbol] | REVPWTEGQGTKVEIKEPKSCDKTHTCPPCPAPELLGGPSVFLFPPKPKD | |
| [symbol] | TLMISRTPEVTCVVVDVSHEDPEVKFNWYVDGVEVHNAKTKPREEQYNST | |
| CD3z signaling | YRVVSVLTVLHQDWLNGKEYKCKVSNKALPAPIEKTISKAKGQPREPQVY | |
| domain, P2A, IL21 | TLPPSRDELTKNQVSLTCLVKGFYPSDIAVEWESNGQPENNYKTTPPVLD | |
| | SDGSFFLYSKLTVDKSRWQQGNVFSCSVMHEALHNHYTQKSLSLSPGKFW | |
| | VLVVVGGVLACYSLLVTVAFIIFWV [symbol] [symbol] | |
| | [symbol] RVKFSRSADAPAYQQGQNQLYNELNLGRREEYDV | |
| | LDKRRGRDPEMGGKPRRKNPQEGLYNELQKDKMAEAYSEIGMKGERRRGK | |
| | GHDGLYQGLSTATKDTYDALHMQALPPRGSGATNFSLLKQAGDVEENPGP | |
| | RSSPGNMERIVICLMVIFLGTLVHKSSSQGQDRHMIRMRQLIDIVDQLKN | |
| | YVNDLVPEFLPAPEDVETNCEWSAFSCFQKAQLKSANTGNNERIINVSIK | |
| | KLKRKPPSTNAGRRQKHRLTCPSCDSYEKKPPKEFLERFKSLLQKMIHQH | |
| | LSSRTHGSEDS | |
| CAT-CD70-239 | MARPHPWWLCVLGTLVGLSATPAPKSCPERHYWAQGKLCCQMCEPGTFLV | 2623 |
| CD27 signal peptide, | KDCDQHRKAAQCDPCIPGVSFSPDHHTRPHCESCRHCNSGLLVRNCTITA | |
| CD27 extracellular | NAECACRNGWQCRDKECTECDPLPNPSLTARSSQALSPHPQPTHLPYVSE | |
| domain, CD27 | MLEARTAGHMQTLADFRQLPARTLSTHWPPQRSLCSSDFIRILVIFSGMF | |
| transmembrane | LVFTLAGALFL [symbol] [symbol] | |
| domain, [symbol] | [symbol] RVKFSRSADAPAYQQGQNQLYNELNLGRREEYDVLDKRRGRDPEMG | |
| [symbol] | GKPRRKNPQEGLYNELQKDKMAEAYSEIGMKGERRRGKGHDGLYQGLSTA | |
| CD3z signaling | TKDTYDALHMQALPPRGSGATNFSLLKQAGDVEENPGPCPARSLLLVATL | |
| domain, P2A, p40, | VLLDHLSLARNLPVATPDPGMFPCLHHSQNLLRAVSNMLQKARQTLEFYP | |
| P2A, p35 | CTSEEIDHEDITKDKTSTVEACLPLELTKNESCLNSRETSFITNGSCLAS | |
| | RKTSFMMALCLSSIYEDLKMYQVEFKTMNAKLLMDPKRQIFLDQNMLAVI | |
| | DELMQALNFNSETVPQKSSLEEPDFYKTKIKLCILLHAFRIRAVTIDRVM | |
| | SYLNASGSGATNFSLLKQAGDVEENPGPCHQQLVISWFSLVFLASPLVAI | |
| | WELKKDVYVVELDWYPDAPGEMVVLTCDTPEEDGITWTLDQSSEVLGSGK | |
| | TLTIQVKEFGDAGQYTCHKGGEVLSHSLLLLHKKEDGIWSTDILKDQKEP | |
| | KNKTFLRCEAKNYSGRFTCWWLTTISTDLTFSVKSSRGSSDPQGVTCGAA | |
| | TLSAERVRGDNKEYEYSVECQEDSACPAAEESLPIEVMVDAVHKLKYENY | |
| | TSSFFIRDIIKPDPPKNLQLKPLKNSRQVEVSWEYPDTWSTPHSYFSLTF | |
| | CVQVQGKSKREKKDRVFTDKTSATVICRKNASISVRAQDRYYSSSWSEWA | |
| | SVPCS | |
| CAT-CD70-240 | MALPVTALLLPLALLLHAARPQVQLVQSGAEVKKPGASVKVSCKASGYTF | 2624 |
| CD8α signal peptide, | TNYGMNWVRQAPGQGLKWMGWINTYTGEPTYADAFKGRVTMTRDTSISTA | |
| CD70 scFv (1F6), | YMELSRLRSDDTAVYYCARDYGDYGMDYWGQGTTVTVSSGGGGSGGGGSG | |
| CD8α hinge, CD8α | GGGSGDIVMTQSPDSLAVSLGERATINCRASKSVSTSGYSFMHWYQQKPG | |
| transmembrane | QPPKLLIYLASNLESGVPDRFSGSGSGTDFTLTISSLQAEDVAVYYCQHS | |
| domain, [symbol] | REVPWTFGQGTKVEIKFVPVFLPAKPTTTPAPRPPTPAPTIASQPLSLRP | |
| [symbol] | EACRPAAGGAVHTRGLDFACDIYIWAPLAGTCGVLLLSLVITLYCNHRN [symbol] | |
| CD3z signaling | [symbol] [symbol] RVKFSRSA | |
| domain, P2A, p40, | DAPAYQQGQNQLYNELNLGRREEYDVLDKRRGRDPEMGGKPRRKNPQEGL | |
| P2A, p35 | YNELQKDKMAEAYSEIGMKGERRRGKGHDGLYQGLSTATKDTYDALHMQA | |
| | LPPRGSGATNFSLLKQAGDVEENPGPCPARSLLLVATLVLLDHLSLARNL | |
| | PVATPDPGMFPCLHHSQNLLRAVSNMLQKARQTLEFYPCTSEEIDHEDIT | |
| | KDKTSTVEACLPLELTKNESCLNSRETSFITNGSCLASRKTSFMMALCLS | |
| | SIYEDLKMYQVEFKTMNAKLLMDPKRQIFLDQNMLAVIDELMQALNFNSE | |
| | TVPQKSSLEEPDFYKTKIKLCILLHAFRIRAVTIDRVMSYLNASGSGATN | |
| | FSLLKQAGDVEENPGPCHQQLVISWFSLVFLASPLVAIWELKKDVYVVEL | |
| | DWYPDAPGEMVVLTCDTPEEDGITWTLDQSSEVLGSGKTLTIQVKEFGDA | |
| | GQYTCHKGGEVLSHSLLLLHKKEDGIWSTDILKDQKEPKNKTFLRCEAKN | |
| | YSGRFTCWWLTTISTDLTFSVKSSRGSSDPQGVTCGAATLSAERVRGDNK | |
| | EYEYSVECQEDSACPAAEESLPIEVMVDAVHKLKYENYTSSFFIRDIIKP | |
| | DPPKNLQLKPLKNSRQVEVSWEYPDTWSTPHSYFSLTFCVQVQGKSKREK | |
| | KDRVFTDKTSATVICRKNASISVRAQDRYYSSSWSEWASVPCS | |
| CAT-CD70-241 | MALPVTALLLPLALLLHAARPQVQLVQSGAEVKKPGASVKVSCKASGYTF | 2625 |
| CD8α signal peptide, | TNYGMNWVRQAPGQGLKWMGWINTYTGEPTYADAFKGRVTMTRDTSISTA | |
| CD70 scFv (1F6), | YMELSRLRSDDTAVYYCARDYGDYGMDYWGQGTTVTVSSGGGGSGGGGSG | |
| IgG1 hinge, CD28 | GGGSGDIVMTQSPDSLAVSLGERATINCRASKSVSTSGYSFMHWYQQKPG | |
| transmembrane | QPPKLLIYLASNLESGVPDRFSGSGSGTDFTLTISSLQAEDVAVYYCQHS | |
| domain, [symbol] | REVPWTFGQGTKVEIKEPKSCDKTHTCPPCPAPELLGGPSVFLFPPKPKD | |
| [symbol] | TLMISRTPEVTCVVVDVSHEDPEVKFNWYVDGVEVHNAKTKPREEQYNST | |
| CD3z signaling | YRVVSVLTVLHQDWLNGKEYKCKVSNKALPAPIEKTISKAKGQPREPQVY | |
| domain, P2A, p40, | TLPPSRDELTKNQVSLTCLVKGFYPSDIAVEWESNGQPENNYKTTPPVLD | |
| P2A, p35 | SDGSFFLYSKLTVDKSRWQQGNVFSCSVMHEALHNHYTQKSLSLSPGKFW | |
| | VLVVVGGVLACYSLLVTVAFIIFWV [symbol] [symbol] | |
| | [symbol] RVKFSRSADAPAYQQGQNQLYNELNLGRREEYDV | |
| | LDKRRGRDPEMGGKPRRKNPQEGLYNELQKDKMAEAYSEIGMKGERRRGK | |
| | GHDGLYQGLSTATKDTYDALHMQALPPRGSGATNFSLLKQAGDVEENPGP | |
| | CPARSLLLVATLVLLDHLSLARNLPVATPDPGMFPCLHHSQNLLRAVSNM | |
| | LQKARQTLEFYPCTSEEIDHEDITKDKTSTVEACLPLELTKNESCLNSRE | |
| | TSFITNGSCLASRKTSFMMALCLSSIYEDLKMYQVEFKTMNAKLLMDPKR | |
| | QIFLDQNMLAVIDELMQALNFNSETVPQKSSLEEPDFYKTKIKLCILLHA | |
| | FRIRAVTIDRVMSYLNASGSGATNFSLLKQAGDVEENPGPCHQQLVISWF | |
| | SLVFLASPLVAIWELKKDVYVVELDWYPDAPGEMVVLTCDTPEEDGITWT | |
| | LDQSSEVLGSGKTLTIQVKEFGDAGQYTCHKGGEVLSHSLLLLHKKEDGI | |
| | WSTDILKDQKEPKNKTFLRCEAKNYSGRFTCWWLTTISTDLTFSVKSSRG | |
| | SSDPQGVTCGAATLSAERVRGDNKEYEYSVECQEDSACPAAEESLPIEVM | |
| | VDAVHKLKYENYTSSFFIRDIIKPDPPKNLQLKPLKNSRQVEVSWEYPDT | |
| | WSTPHSYFSLTFCVQVQGKSKREKKDRVFTDKTSATVICRKNASISVRAQ | |
| | DRYYSSSWSEWASVPCS | |
| CAT-CD70-243 | MALPVTALLLPLALLLHAARPQVQLVQSGAEVKKPGASVKVSCKASGYTF | 2626 |
| CD8α signal peptide, | TNYGMNWVRQAPGQGLKWMGWINTYTGEPTYADAFKGRVTMTRDTSISTA | |
| CD70 scFv (1F6), | YMELSRLRSDDTAVYYCARDYGDYGMDYWGQGTTVTVSSGGGGSGGGGSG | |
| CD8α hinge, CD8α | GGGSGDIVMTQSPDSLAVSLGERATINCRASKSVSTSGYSFMHWYQQKPG | |
| transmembrane | QPPKLLIYLASNLESGVPDRFSGSGSGTDFTLTISSLQAEDVAVYYCQHS | |
| domain, [symbol] | REVPWTFGQGTKVEIKFVPVFLPAKPTTTPAPRPPTPAPTIASQPLSLRP | |
| [symbol] | EACRPAAGGAVHTRGLDFACDIYIWAPLAGTCGVLLLSLVITLYCNHRN [symbol] | |
| CD3z signaling | [symbol] [symbol] RVKFSRSADA | |
| domain, P2A, p40, | PAYQQGQNQLYNELNLGRREEYDVLDKRRGRDPEMGGKPRRKNPQEGLYN | |
| P2A, p35 | ELQKDKMAEAYSEIGMKGERRRGKGHDGLYQGLSTATKDTYDALHMQALP | |
| | PRGSGATNFSLLKQAGDVEENPGPCPARSLLLVATLVLLDHLSLARNLPV | |
| | ATPDPGMFPCLHHSQNLLRAVSNMLQKARQTLEFYPCTSEEIDHEDITKD | |
| | KTSTVEACLPLELTKNESCLNSRETSFITNGSCLASRKTSFMMALCLSSI | |
| | YEDLKMYQVEFKTMNAKLLMDPKRQIFLDQNMLAVIDELMQALNFNSETV | |
| | PQKSSLEEPDFYKTKIKLCILLHAFRIRAVTIDRVMSYLNASGSGATNFS | |
| | LLKQAGDVEENPGPCHQQLVISWFSLVFLASPLVAIWELKKDVYVVELDW | |
| | YPDAPGEMVVLTCDTPEEDGITWTLDQSSEVLGSGKTLTIQVKEFGDAGQ | |
| | YTCHKGGEVLSHSLLLLHKKEDGIWSTDILKDQKEPKNKTFLRCEAKNYS | |
| | GRFTCWWLTTISTDLTFSVKSSRGSSDPQGVTCGAATLSAERVRGDNKEY | |
| | EYSVECQEDSACPAAEESLPIEVMVDAVHKLKYENYTSSFFIRDIIKPDP | |
| | PKNLQLKPLKNSRQVEVSWEYPDTWSTPHSYFSLTFCVQVQGKSKREKKD | |
| | RVFTDKTSATVICRKNASISVRAQDRYYSSSWSEWASVPCS | |
| CAT-CD70-246 | MARPHPWWLCVLGTLVGLSATPAPKSCPERHYWAQGKLCCQMCEPGTFLV | 2627 |
| CD27 signal peptide, | KDCDQHRKAAQCDPCIPGVSFSPDHHTRPHCESCRHCNSGLLVRNCTITA | |
| CD27 extracellular | NAECACRNGWQCRDKECTECDPLPNPSLTARSSQALSPHPQPTHLPYVSE | |
| domain, CD27 | MLEARTAGHMQTLADFRQLPARTLSTHWPPQRSLCSSDFIRILVIFSGMF | |
| transmembrane | LVFTLAGALFL [symbol] [symbol] | |
| domain, [symbol] | [symbol] RVKFSRSADAPAYQQGQNQLYNELNLGRREEYDVLDKRRG | |
| [symbol] | RDPEMGGKPRRKNPQEGLYNELQKDKMAEAYSEIGMKGERRRGKGHDGLY | |
| CD3z signaling | QGLSTATKDTYDALHMQALPPRGSGATNFSLLKQAGDVEENPGPGRGLLR | |
| domain, P2A, | GLWPLHIVLWTRIASTIPPHVQKSVNNDMIVTDNNGAVKFPQLCKFCDVR | |
| TGFbR2 DN domain | FSTCDNQKSCMSNCSITSICEKPQEVCVAVWRKNDENITLETVCHDPKLP | |
| | YHDFILEDAASPKCIMKEKKKPGETFFMCSCSSDECNDNIIFSEEYNTSN | |
| | PDLLLVIFQVTGISLLPPLGVAISVIIIFYCYRVNRQQKLSS | |
| CAT-CD70-247 | MARPHPWWLCVLGTLVGLSATPAPKSCPERHYWAQGKLCCQMCEPGTFLV | 2628 |
| CD27 signal peptide, | KDCDQHRKAAQCDPCIPGVSFSPDHHTRPHCESCRHCNSGLLVRNCTITA | |
| CD27 extracellular | NAECACRNGWQCRDKECTECDPLPNPSLTARSSQALSPHPQPTHLPYVSE | |
| domain, CD27 | MLEARTAGHMQTLADFRQLPARTLSTHWPPQRSLCSSDFIRILVIFSGMF | |
| transmembrane | LVFTLAGALFL [symbol] [symbol] | |
| domain, [symbol] | [symbol] RVKFSRSADAPAYQQGQNQLYNELNLGRREEYDVLDKRRGRDPEMG | |
| [symbol] | GKPRRKNPQEGLYNELQKDKMAEAYSEIGMKGERRRGKGHDGLYQGLSTA | |
| CD3z signaling | TKDTYDALHMQALPPRGSGATNFSLLKQAGDVEENPGPGRGLLRGLWPLH | |
| domain, P2A, | IVLWTRIASTIPPHVQKSVNNDMIVTDNNGAVKFPQLCKFCDVRFSTCDN | |
| TGFbR2 DN domain | QKSCMSNCSITSICEKPQEVCVAVWRKNDENITLETVCHDPKLPYHDFIL | |
| | EDAASPKCIMKEKKKPGETFFMCSCSSDECNDNIIFSEEYNTSNPDLLLV | |
| | IFQVTGISLLPPLGVAISVIIIFYCYRVNRQQKLSS | |
| CAT-CD70-248 | MALPVTALLLPLALLLHAARPQVQLVQSGAEVKKPGASVKVSCKASGYTF | 2629 |
| CD8α signal peptide, | TNYGMNWVRQAPGQGLKWMGWINTYTGEPTYADAFKGRVTMTRDTSISTA | |
| CD70 scFv (1F6), | YMELSRLRSDDTAVYYCARDYGDYGMDYWGQGTTVTVSSGGGGSGGGGSG | |
| CD8α hinge, CD8α | GGGSGDIVMTQSPDSLAVSLGERATINCRASKSVSTSGYSFMHWYQQKPG | |
| transmembrane | QPPKLLIYLASNLESGVPDRFSGSGSGTDFTLTISSLQAEDVAVYYCQHS | |
| domain, [symbol] | REVPWTFGQGTKVEIKFVPVFLPAKPTTTPAPRPPTPAPTIASQPLSLRP | |
| [symbol] | EACRPAAGGAVHTRGLDFACDIYIWAPLAGTCGVLLLSLVITLYCNHRN [symbol] | |
| CD3z signaling | [symbol] [symbol] RVKFSRSADA | |
| domain, P2A, | PAYQQGQNQLYNELNLGRREEYDVLDKRRGRDPEMGGKPRRKNPQEGLYN | |
| TGFbR2 DN domain | ELQKDKMAEAYSEIGMKGERRRGKGHDGLYQGLSTATKDTYDALHMQALP | |
| | PRGSGATNFSLLKQAGDVEENPGPGRGLLRGLWPLHIVLWTRIASTIPPH | |
| | VQKSVNNDMIVTDNNGAVKFPQLCKFCDVRFSTCDNQKSCMSNCSITSIC | |
| | EKPQEVCVAVWRKNDENITLETVCHDPKLPYHDFILEDAASPKCIMKEKK | |
| | KPGETFFMCSCSSDECNDNIIFSEEYNTSNPDLLLVIFQVTGISLLPPLG | |
| | VAISVIIIFYCYRVNRQQKLSS | |
| CAT-CD70-249 | MALPVTALLLPLALLLHAARPQVQLVQSGAEVKKPGASVKVSCKASGYTF | 2630 |
| CD8α signal peptide, | TNYGMNWVRQAPGQGLKWMGWINTYTGEPTYADAFKGRVTMTRDTSISTA | |
| CD70 scFv (1F6), | YMELSRLRSDDTAVYYCARDYGDYGMDYWGQGTTVTVSSGGGGSGGGGSG | |
| CD8α hinge, CD8α | GGGSGDIVMTQSPDSLAVSLGERATINCRASKSVSTSGYSFMHWYQQKPG | |
| transmembrane | QPPKLLIYLASNLESGVPDRFSGSGSGTDFTLTISSLQAEDVAVYYCQHS | |
| domain, [symbol] | REVPWTFGQGTKVEIKFVPVFLPAKPTTTPAPRPPTPAPTIASQPLSLRP | |
| [symbol] | EACRPAAGGAVHTRGLDFACDIYIWAPLAGTCGVLLLSLVITLYCNHRN [symbol] | |
| CD3z signaling | [symbol] [symbol] RVKFSRSA | |
| domain, P2A, | DAPAYQQGQNQLYNELNLGRREEYDVLDKRRGRDPEMGGKPRRKNPQEGL | |
| TGFbR2 DN domain | YNELQKDKMAEAYSEIGMKGERRRGKGHDGLYQGLSTATKDTYDALHMQA | |
| | LPPRGSGATNFSLLKQAGDVEENPGPGRGLLRGLWPLHIVLWTRIASTIP | |
| | PHVQKSVNNDMIVTDNNGAVKFPQLCKFCDVRFSTCDNQKSCMSNCSITS | |
| | ICEKPQEVCVAVWRKNDENITLETVCHDPKLPYHDFILEDAASPKCIMKE | |
| | KKKPGETFFMCSCSSDECNDNIIFSEEYNTSNPDLLLVIFQVTGISLLPP | |
| | LGVAISVIIIFYCYRVNRQQKLSS | |
| CAT-CD70-250 | MALPVTALLLPLALLLHAARPQVQLVQSGAEVKKPGASVKVSCKASGYTF | 2631 |
| CD8α signal peptide, | TNYGMNWVRQAPGQGLKWMGWINTYTGEPTYADAFKGRVTMTRDTSISTA | |
| CD70 scFv (1F6), | YMELSRLRSDDTAVYYCARDYGDYGMDYWGQGTTVTVSSGGGGSGGGGSG | |
| IgG1 hinge, CD28 | GGGSGDIVMTQSPDSLAVSLGERATINCRASKSVSTSGYSFMHWYQQKPG | |
| transmembrane | QPPKLLIYLASNLESGVPDRFSGSGSGTDFTLTISSLQAEDVAVYYCQHS | |
| domain, [symbol] | REVPWTEGQGTKVEIKEPKSCDKTHTCPPCPAPELLGGPSVFLFPPKPKD | |
| [symbol] | TLMISRTPEVTCVVVDVSHEDPEVKFNWYVDGVEVHNAKTKPREEQYNST | |
| CD3z signaling | YRVVSVLTVLHQDWLNGKEYKCKVSNKALPAPIEKTISKAKGQPREPQVY | |
| domain, P2A, | TLPPSRDELTKNQVSLTCLVKGFYPSDIAVEWESNGQPENNYKTTPPVLD | |
| TGFbR2 DN domain | SDGSFFLYSKLTVDKSRWQQGNVFSCSVMHEALHNHYTQKSLSLSPGKFW | |
| | VLVVVGGVLACYSLLVTVAFIIFWV [symbol] [symbol] | |
| | [symbol] RVKFSRSADAPAYQQGQNQLYNELNLGRREEYDV | |
| | LDKRRGRDPEMGGKPRRKNPQEGLYNELQKDKMAEAYSEIGMKGERRRGK | |
| | GHDGLYQGLSTATKDTYDALHMQALPPRGSGATNFSLLKQAGDVEENPGP | |
| | GRGLLRGLWPLHIVLWTRIASTIPPHVQKSVNNDMIVTDNNGAVKFPQLC | |
| | KFCDVRFSTCDNQKSCMSNCSITSICEKPQEVCVAVWRKNDENITLETVC | |
| | HDPKLPYHDFILEDAASPKCIMKEKKKPGETFFMCSCSSDECNDNIIFSE | |
| | EYNTSNPDLLLVIFQVTGISLLPPLGVAISVIIIFYCYRVNRQQKLSS | |
| CAT-CD70-251 | MARPHPWWLCVLGTLVGLSATPAPKSCPERHYWAQGKLCCQMCEPGTFLV | 2632 |
| CD27 signal peptide, | KDCDQHRKAAQCDPCIPGVSFSPDHHTRPHCESCRHCNSGLLVRNCTITA | |
| CD27 extracellular | NAECACRNGWQCRDKECTECDPLPNPSLTARSSQALSPHPQPTHLPYVSE | |
| domain, CD27 | MLEARTAGHMQTLADFRQLPARTLSTHWPPQRSLCSSDFIRILVIFSGMF | |
| transmembrane | LVFTLAGALFL [symbol] [symbol] | |
| domain, [symbol] | [symbol] RVKFSRSADAPAYQQGQNQLYNELNLGRREEYDVLDKRRG | |
| [symbol] | RDPEMGGKPRRKNPQEGLYNELQKDKMAEAYSEIGMKGERRRGKGHDGLY | |
| CD3z signaling | QGLSTATKDTYDALHMQALPPRGSGATNFSLLKQAGDVEENPGPGRGLLR | |
| domain, P2A, | GLWPLHIVLWTRIASTIPPHVQKSVNNDMIVTDNNGAVKFPQLCKFCDVR | |
| TGFbR2 DN domain, | FSTCDNQKSCMSNCSITSICEKPQEVCVAVWRKNDENITLETVCHDPKLP | |
| P2A, IL-15 | YHDFILEDAASPKCIMKEKKKPGETFFMCSCSSDECNDNIIFSEEYNTSN | |
| | PDLLLVIFQVTGISLLPPLGVAISVIIIFYCYRVNRQQKLSSGSGATNFS | |
| | LLKQAGDVEENPGPRISKPHLRSISIQCYLCLLLNSHFLTEAGIHVFILG | |
| | CFSAGLPKTEANWVNVISDLKKIEDLIQSMHIDATLYTESDVHPSCKVTA | |
| | MKCFLLELQVISLESGDASIHDTVENLIILANNSLSSNGNVTESGCKECE | |
| | ELEEKNIKEFLQSFVHIVQMFINTS | |
| CAT-CD70-252 | MARPHPWWLCVLGTLVGLSATPAPKSCPERHYWAQGKLCCQMCEPGTFLV | 2633 |
| CD27 signal peptide, | KDCDQHRKAAQCDPCIPGVSFSPDHHTRPHCESCRHCNSGLLVRNCTITA | |
| CD27 extracellular | NAECACRNGWQCRDKECTECDPLPNPSLTARSSQALSPHPQPTHLPYVSE | |
| domain, CD27 | MLEARTAGHMQTLADFRQLPARTLSTHWPPQRSLCSSDFIRILVIFSGMF | |
| transmembrane | LVFTLAGALFL [symbol] [symbol] | |
| domain, [symbol] | [symbol] RVKFSRSADAPAYQQGQNQLYNELNLGRREEYDVLDKRRGRDPEMG | |
| [symbol] | GKPRRKNPQEGLYNELQKDKMAEAYSEIGMKGERRRGKGHDGLYQGLSTA | |
| CD3z signaling | TKDTYDALHMQALPPRGSGATNFSLLKQAGDVEENPGPGRGLLRGLWPLH | |
| domain, P2A, | IVLWTRIASTIPPHVQKSVNNDMIVTDNNGAVKFPQLCKFCDVRFSTCDN | |
| TGFbR2 DN domain, | QKSCMSNCSITSICEKPQEVCVAVWRKNDENITLETVCHDPKLPYHDFIL | |
| P2A, IL-15 | EDAASPKCIMKEKKKPGETFFMCSCSSDECNDNIIFSEEYNTSNPDLLLV | |
| | IFQVTGISLLPPLGVAISVIIIFYCYRVNRQQKLSSGSGATNFSLLKQAG | |
| | DVEENPGPRISKPHLRSISIQCYLCLLLNSHFLTEAGIHVFILGCFSAGL | |
| | PKTEANWVNVISDLKKIEDLIQSMHIDATLYTESDVHPSCKVTAMKCFLL | |
| | ELQVISLESGDASIHDTVENLIILANNSLSSNGNVTESGCKECEELEEKN | |
| | IKEFLQSFVHIVQMFINTS | |
| CAT-CD70-253 | MALPVTALLLPLALLLHAARPQVQLVQSGAEVKKPGASVKVSCKASGYTF | 2634 |
| CD8α signal peptide, | TNYGMNWVRQAPGQGLKWMGWINTYTGEPTYADAFKGRVTMTRDTSISTA | |
| CD70 scFv (1F6), | YMELSRLRSDDTAVYYCARDYGDYGMDYWGQGTTVTVSSGGGGSGGGGSG | |
| CD8α hinge, CD8α | GGGSGDIVMTQSPDSLAVSLGERATINCRASKSVSTSGYSFMHWYQQKPG | |
| transmembrane | QPPKLLIYLASNLESGVPDRFSGSGSGTDFTLTISSLQAEDVAVYYCQHS | |
| domain, [symbol] | REVPWTFGQGTKVEIKFVPVFLPAKPTTTPAPRPPTPAPTIASQPLSLRP | |
| [symbol] | EACRPAAGGAVHTRGLDFACDIYIWAPLAGTCGVLLLSLVITLYCNHRN [symbol] | |
| CD3z signaling | [symbol] [symbol] RVKFSRSADA | |
| domain, P2A, | PAYQQGQNQLYNELNLGRREEYDVLDKRRGRDPEMGGKPRRKNPQEGLYN | |
| TGFbR2 DN domain, | ELQKDKMAEAYSEIGMKGERRRGKGHDGLYQGLSTATKDTYDALHMQALP | |
| P2A, IL-15 | PRGSGATNFSLLKQAGDVEENPGPGRGLLRGLWPLHIVLWTRIASTIPPH | |
| | VQKSVNNDMIVTDNNGAVKFPQLCKFCDVRFSTCDNQKSCMSNCSITSIC | |
| | EKPQEVCVAVWRKNDENITLETVCHDPKLPYHDFILEDAASPKCIMKEKK | |
| | KPGETFFMCSCSSDECNDNIIFSEEYNTSNPDLLLVIFQVTGISLLPPLG | |
| | VAISVIIIFYCYRVNRQQKLSSGSGATNFSLLKQAGDVEENPGPRISKPH | |
| | LRSISIQCYLCLLLNSHFLTEAGIHVFILGCFSAGLPKTEANWVNVISDL | |
| | KKIEDLIQSMHIDATLYTESDVHPSCKVTAMKCFLLELQVISLESGDASI | |
| | HDTVENLIILANNSLSSNGNVTESGCKECEELEEKNIKEFLQSFVHIVQM | |
| | FINTS | |
| CAT-CD70-254 | MALPVTALLLPLALLLHAARPQVQLVQSGAEVKKPGASVKVSCKASGYTF | 2635 |
| CD8α signal peptide, | TNYGMNWVRQAPGQGLKWMGWINTYTGEPTYADAFKGRVTMTRDTSISTA | |
| CD70 scFv (1F6), | YMELSRLRSDDTAVYYCARDYGDYGMDYWGQGTTVTVSSGGGGSGGGGSG | |
| CD8α hinge, CD8α | GGGSGDIVMTQSPDSLAVSLGERATINCRASKSVSTSGYSFMHWYQQKPG | |
| transmembrane | QPPKLLIYLASNLESGVPDRFSGSGSGTDFTLTISSLQAEDVAVYYCQHS | |
| domain, [symbol] | REVPWTFGQGTKVEIKFVPVFLPAKPTTTPAPRPPTPAPTIASQPLSLRP | |
| [symbol] | EACRPAAGGAVHTRGLDFACDIYIWAPLAGTCGVLLLSLVITLYCNHRN [symbol] | |
| CD3z signaling | [symbol] [symbol] RVKFSRSA | |
| domain, P2A, | DAPAYQQGQNQLYNELNLGRREEYDVLDKRRGRDPEMGGKPRRKNPQEGL | |
| TGFbR2 DN domain, | YNELQKDKMAEAYSEIGMKGERRRGKGHDGLYQGLSTATKDTYDALHMQA | |
| P2A, IL-15 | LPPRGSGATNFSLLKQAGDVEENPGPGRGLLRGLWPLHIVLWTRIASTIP | |
| | PHVQKSVNNDMIVTDNNGAVKFPQLCKFCDVRFSTCDNQKSCMSNCSITS | |
| | ICEKPQEVCVAVWRKNDENITLETVCHDPKLPYHDFILEDAASPKCIMKE | |
| | KKKPGETFFMCSCSSDECNDNIIFSEEYNTSNPDLLLVIFQVTGISLLPP | |
| | LGVAISVIIIFYCYRVNRQQKLSSGSGATNFSLLKQAGDVEENPGPRISK | |
| | PHLRSISIQCYLCLLLNSHFLTEAGIHVFILGCFSAGLPKTEANWVNVIS | |
| | DLKKIEDLIQSMHIDATLYTESDVHPSCKVTAMKCFLLELQVISLESGDA | |
| | SIHDTVENLIILANNSLSSNGNVTESGCKECEELEEKNIKEFLQSFVHIV | |
| | QMFINTS | |
| CAT-CD70-255 | MALPVTALLLPLALLLHAARPQVQLVQSGAEVKKPGASVKVSCKASGYTF | 2636 |
| CD8α signal peptide, | TNYGMNWVRQAPGQGLKWMGWINTYTGEPTYADAFKGRVTMTRDTSISTA | |
| CD70 scFv (1F6), | YMELSRLRSDDTAVYYCARDYGDYGMDYWGQGTTVTVSSGGGGSGGGGSG | |
| IgG1 hinge, CD28 | GGGSGDIVMTQSPDSLAVSLGERATINCRASKSVSTSGYSFMHWYQQKPG | |
| transmembrane | QPPKLLIYLASNLESGVPDRFSGSGSGTDFTLTISSLQAEDVAVYYCQHS | |
| domain, [symbol] | REVPWTEGQGTKVEIKEPKSCDKTHTCPPCPAPELLGGPSVFLFPPKPKD | |
| [symbol] | TLMISRTPEVTCVVVDVSHEDPEVKFNWYVDGVEVHNAKTKPREEQYNST | |
| CD3z signaling | YRVVSVLTVLHQDWLNGKEYKCKVSNKALPAPIEKTISKAKGQPREPQVY | |
| domain, P2A, | TLPPSRDELTKNQVSLTCLVKGFYPSDIAVEWESNGQPENNYKTTPPVLD | |
| TGFbR2 DN domain, | SDGSFFLYSKLTVDKSRWQQGNVFSCSVMHEALHNHYTQKSLSLSPGKFW | |
| P2A, IL-15 | VLVVVGGVLACYSLLVTVAFIIFWV [symbol] [symbol] | |
| | [symbol] RVKFSRSADAPAYQQGQNQLYNELNLGRREEYDV | |
| | LDKRRGRDPEMGGKPRRKNPQEGLYNELQKDKMAEAYSEIGMKGERRRGK | |
| | GHDGLYQGLSTATKDTYDALHMQALPPRGSGATNFSLLKQAGDVEENPGP | |
| | GRGLLRGLWPLHIVLWTRIASTIPPHVQKSVNNDMIVTDNNGAVKFPQLC | |
| | KFCDVRFSTCDNQKSCMSNCSITSICEKPQEVCVAVWRKNDENITLETVC | |
| | HDPKLPYHDFILEDAASPKCIMKEKKKPGETFFMCSCSSDECNDNIIFSE | |
| | EYNTSNPDLLLVIFQVTGISLLPPLGVAISVIIIFYCYRVNRQQKLSSGS | |
| | GATNFSLLKQAGDVEENPGPRISKPHLRSISIQCYLCLLLNSHFLTEAGI | |
| | HVFILGCFSAGLPKTEANWVNVISDLKKIEDLIQSMHIDATLYTESDVHP | |
| | SCKVTAMKCFLLELQVISLESGDASIHDTVENLIILANNSLSSNGNVTES | |
| | GCKECEELEEKNIKEFLQSFVHIVQMFINTS | |
| CAT-CD70-256 | MARPHPWWLCVLGTLVGLSATPAPKSCPERHYWAQGKLCCQMCEPGTFLV | 2637 |
| CD27 signal peptide, | KDCDQHRKAAQCDPCIPGVSFSPDHHTRPHCESCRHCNSGLLVRNCTITA | |
| CD27 extracellular | NAECACRNGWQCRDKECTECDPLPNPSLTARSSQALSPHPQPTHLPYVSE | |
| domain, CD27 | MLEARTAGHMQTLADFRQLPARTLSTHWPPQRSLCSSDFIRILVIFSGMF | |
| transmembrane | LVFTLAGALFL [symbol] [symbol] | |
| domain, [symbol] | [symbol] RVKFSRSADAPAYQQGQNQLYNELNLGRREEYDVLDKRRG | |
| [symbol] | RDPEMGGKPRRKNPQEGLYNELQKDKMAEAYSEIGMKGERRRGKGHDGLY | |
| CD3z signaling | QGLSTATKDTYDALHMQALPPRGSGATNFSLLKQAGDVEENPGPGRGLLR | |
| domain, P2A, | GLWPLHIVLWTRIASTIPPHVQKSVNNDMIVTDNNGAVKFPQLCKFCDVR | |
| TGFbR2 DN domain, | FSTCDNQKSCMSNCSITSICEKPQEVCVAVWRKNDENITLETVCHDPKLP | |
| P2A, IL-15Rα, P2A, | YHDFILEDAASPKCIMKEKKKPGETFFMCSCSSDECNDNIIFSEEYNTSN | |
| IL-15 | PDLLLVIFQVTGISLLPPLGVAISVIIIFYCYRVNRQQKLSSGSGATNFS | |
| | LLKQAGDVEENPGPAPRRARGCRTLGLPALLLLLLLRPPATRGITCPPPM | |
| | SVEHADIWVKSYSLYSRERYICNSGFKRKAGTSSLTECVLNKATNVAHWT | |
| | TPSLKCIRDPALVHQRPAPPSTVTTAGVTPQPESLSPSGKEPAASSPSSN | |
| | NTAATTAAIVPGSQLMPSKSPSTGTTEISSHESSHGTPSQTTAKNWELTA | |
| | SASHQPPGVYPQGHSDTTVAISTSTVLLCGLSAVSLLACYLKSRQTPPLA | |
| | SVEMEAMEALPVTWGTSSRDEDLENCSHHLGSGATNFSLLKQAGDVEENP | |
| | GPRISKPHLRSISIQCYLCLLLNSHFLTEAGIHVFILGCFSAGLPKTEAN | |
| | WVNVISDLKKIEDLIQSMHIDATLYTESDVHPSCKVTAMKCFLLELQVIS | |
| | LESGDASIHDTVENLIILANNSLSSNGNVTESGCKECEELEEKNIKEFLQ | |
| | SFVHIVQMFINTS | |
| CAT-CD70-257 | MARPHPWWLCVLGTLVGLSATPAPKSCPERHYWAQGKLCCQMCEPGTFLV | 2638 |
| CD27 signal peptide, | KDCDQHRKAAQCDPCIPGVSFSPDHHTRPHCESCRHCNSGLLVRNCTITA | |
| CD27 extracellular | NAECACRNGWQCRDKECTECDPLPNPSLTARSSQALSPHPQPTHLPYVSE | |
| domain, CD27 | MLEARTAGHMQTLADFRQLPARTLSTHWPPQRSLCSSDFIRILVIFSGMF | |
| transmembrane | LVFTLAGALFL [symbol] [symbol] | |
| domain, [symbol] | [symbol] RVKFSRSADAPAYQQGQNQLYNELNLGRREEYDVLDKRRGRDPEMG | |
| [symbol] | GKPRRKNPQEGLYNELQKDKMAEAYSEIGMKGERRRGKGHDGLYQGLSTA | |
| CD3z signaling | TKDTYDALHMQALPPRGSGATNFSLLKQAGDVEENPGPGRGLLRGLWPLH | |
| domain, P2A, | IVLWTRIASTIPPHVQKSVNNDMIVTDNNGAVKFPQLCKFCDVRFSTCDN | |
| TGFbR2 DN domain, | QKSCMSNCSITSICEKPQEVCVAVWRKNDENITLETVCHDPKLPYHDFIL | |
| P2A, IL-15Rα, P2A, | EDAASPKCIMKEKKKPGETFFMCSCSSDECNDNIIFSEEYNTSNPDLLLV | |
| IL-15 | IFQVTGISLLPPLGVAISVIIIFYCYRVNRQQKLSSGSGATNFSLLKQAG | |
| | DVEENPGPAPRRARGCRTLGLPALLLLLLLRPPATRGITCPPPMSVEHAD | |
| | IWVKSYSLYSRERYICNSGFKRKAGTSSLTECVLNKATNVAHWTTPSLKC | |
| | IRDPALVHQRPAPPSTVTTAGVTPQPESLSPSGKEPAASSPSSNNTAATT | |
| | AAIVPGSQLMPSKSPSTGTTEISSHESSHGTPSQTTAKNWELTASASHQP | |
| | PGVYPQGHSDTTVAISTSTVLLCGLSAVSLLACYLKSRQTPPLASVEMEA | |
| | MEALPVTWGTSSRDEDLENCSHHLGSGATNFSLLKQAGDVEENPGPRISK | |
| | PHLRSISIQCYLCLLLNSHFLTEAGIHVFILGCFSAGLPKTEANWVNVIS | |
| | DLKKIEDLIQSMHIDATLYTESDVHPSCKVTAMKCFLLELQVISLESGDA | |
| | SIHDTVENLIILANNSLSSNGNVTESGCKECEELEEKNIKEFLQSFVHIV | |
| | QMFINTS | |
| CAT-CD70-258 | MALPVTALLLPLALLLHAARPQVQLVQSGAEVKKPGASVKVSCKASGYTF | 2639 |
| CD8α signal peptide, | TNYGMNWVRQAPGQGLKWMGWINTYTGEPTYADAFKGRVTMTRDTSISTA | |
| CD70 scFv (1F6), | YMELSRLRSDDTAVYYCARDYGDYGMDYWGQGTTVTVSSGGGGSGGGGSG | |
| CD8α hinge, CD8α | GGGSGDIVMTQSPDSLAVSLGERATINCRASKSVSTSGYSFMHWYQQKPG | |
| transmembrane | QPPKLLIYLASNLESGVPDRFSGSGSGTDFTLTISSLQAEDVAVYYCQHS | |
| domain, [symbol] | REVPWTFGQGTKVEIKFVPVFLPAKPTTTPAPRPPTPAPTIASQPLSLRP | |
| [symbol] | EACRPAAGGAVHTRGLDFACDIYIWAPLAGTCGVLLLSLVITLYCNHRN [symbol] | |
| CD3z signaling | [symbol] [symbol] RVKFSRSADA | |
| domain, P2A, | PAYQQGQNQLYNELNLGRREEYDVLDKRRGRDPEMGGKPRRKNPQEGLYN | |
| TGFbR2 DN domain, | ELQKDKMAEAYSEIGMKGERRRGKGHDGLYQGLSTATKDTYDALHMQALP | |
| P2A, IL-15Rα, P2A, | PRGSGATNFSLLKQAGDVEENPGPGRGLLRGLWPLHIVLWTRIASTIPPH | |
| IL-15 | VQKSVNNDMIVTDNNGAVKFPQLCKFCDVRFSTCDNQKSCMSNCSITSIC | |
| | EKPQEVCVAVWRKNDENITLETVCHDPKLPYHDFILEDAASPKCIMKEKK | |
| | KPGETFFMCSCSSDECNDNIIFSEEYNTSNPDLLLVIFQVTGISLLPPLG | |
| | VAISVIIIFYCYRVNRQQKLSSGSGATNFSLLKQAGDVEENPGPAPRRAR | |
| | GCRTLGLPALLLLLLLRPPATRGITCPPPMSVEHADIWVKSYSLYSRERY | |
| | ICNSGFKRKAGTSSLTECVLNKATNVAHWTTPSLKCIRDPALVHQRPAPP | |
| | STVTTAGVTPQPESLSPSGKEPAASSPSSNNTAATTAAIVPGSQLMPSKS | |
| | PSTGTTEISSHESSHGTPSQTTAKNWELTASASHQPPGVYPQGHSDTTVA | |
| | ISTSTVLLCGLSAVSLLACYLKSRQTPPLASVEMEAMEALPVTWGTSSRD | |
| | EDLENCSHHLGSGATNFSLLKQAGDVEENPGPRISKPHLRSISIQCYLCL | |
| | LLNSHFLTEAGIHVFILGCFSAGLPKTEANWVNVISDLKKIEDLIQSMHI | |
| | DATLYTESDVHPSCKVTAMKCFLLELQVISLESGDASIHDTVENLIILAN | |
| | NSLSSNGNVTESGCKECEELEEKNIKEFLQSFVHIVQMFINTS | |
| CAT-CD70-259 | MALPVTALLLPLALLLHAARPQVQLVQSGAEVKKPGASVKVSCKASGYTF | 2640 |
| CD8α signal peptide, | TNYGMNWVRQAPGQGLKWMGWINTYTGEPTYADAFKGRVTMTRDTSISTA | |
| CD70 scFv (1F6), | YMELSRLRSDDTAVYYCARDYGDYGMDYWGQGTTVTVSSGGGGSGGGGSG | |
| CD8α hinge, CD8α | GGGSGDIVMTQSPDSLAVSLGERATINCRASKSVSTSGYSFMHWYQQKPG | |
| transmembrane | QPPKLLIYLASNLESGVPDRFSGSGSGTDFTLTISSLQAEDVAVYYCQHS | |
| domain, [symbol] | REVPWTFGQGTKVEIKFVPVFLPAKPTTTPAPRPPTPAPTIASQPLSLRP | |
| [symbol] | EACRPAAGGAVHTRGLDFACDIYIWAPLAGTCGVLLLSLVITLYCNHRN [symbol] | |
| CD3z signaling | [symbol] [symbol] RVKFSRSA | |
| domain, P2A, | DAPAYQQGQNQLYNELNLGRREEYDVLDKRRGRDPEMGGKPRRKNPQEGL | |
| TGFbR2 DN domain, | YNELQKDKMAEAYSEIGMKGERRRGKGHDGLYQGLSTATKDTYDALHMQA | |
| P2A, IL-15Rα, P2A, | LPPRGSGATNFSLLKQAGDVEENPGPGRGLLRGLWPLHIVLWTRIASTIP | |
| IL-15 | PHVQKSVNNDMIVTDNNGAVKFPQLCKFCDVRFSTCDNQKSCMSNCSITS | |
| | ICEKPQEVCVAVWRKNDENITLETVCHDPKLPYHDFILEDAASPKCIMKE | |
| | KKKPGETFFMCSCSSDECNDNIIFSEEYNTSNPDLLLVIFQVTGISLLPP | |
| | LGVAISVIIIFYCYRVNRQQKLSSGSGATNFSLLKQAGDVEENPGPAPRR | |
| | ARGCRTLGLPALLLLLLLRPPATRGITCPPPMSVEHADIWVKSYSLYSRE | |
| | RYICNSGFKRKAGTSSLTECVLNKATNVAHWTTPSLKCIRDPALVHQRPA | |
| | PPSTVTTAGVTPQPESLSPSGKEPAASSPSSNNTAATTAAIVPGSQLMPS | |
| | KSPSTGTTEISSHESSHGTPSQTTAKNWELTASASHQPPGVYPQGHSDTT | |
| | VAISTSTVLLCGLSAVSLLACYLKSRQTPPLASVEMEAMEALPVTWGTSS | |
| | RDEDLENCSHHLGSGATNFSLLKQAGDVEENPGPRISKPHLRSISIQCYL | |
| | CLLLNSHFLTEAGIHVFILGCFSAGLPKTEANWVNVISDLKKIEDLIQSM | |
| | HIDATLYTESDVHPSCKVTAMKCFLLELQVISLESGDASIHDTVENLIIL | |
| | ANNSLSSNGNVTESGCKECEELEEKNIKEFLQSFVHIVQMFINTS | |
| CAT-CD70-260 | MALPVTALLLPLALLLHAARPQVQLVQSGAEVKKPGASVKVSCKASGYTF | 2641 |
| CD8α signal peptide, | TNYGMNWVRQAPGQGLKWMGWINTYTGEPTYADAFKGRVTMTRDTSISTA | |
| CD70 scFv (1F6), | YMELSRLRSDDTAVYYCARDYGDYGMDYWGQGTTVTVSSGGGGSGGGGSG | |
| IgG1 hinge, CD28 | GGGSGDIVMTQSPDSLAVSLGERATINCRASKSVSTSGYSFMHWYQQKPG | |
| transmembrane | QPPKLLIYLASNLESGVPDRFSGSGSGTDFTLTISSLQAEDVAVYYCQHS | |
| domain, [symbol] | REVPWTEGQGTKVEIKEPKSCDKTHTCPPCPAPELLGGPSVFLFPPKPKD | |
| [symbol] | TLMISRTPEVTCVVVDVSHEDPEVKFNWYVDGVEVHNAKTKPREEQYNST | |
| CD3z signaling | YRVVSVLTVLHQDWLNGKEYKCKVSNKALPAPIEKTISKAKGQPREPQVY | |
| domain, P2A, | TLPPSRDELTKNQVSLTCLVKGFYPSDIAVEWESNGQPENNYKTTPPVLD | |
| TGFbR2 DN domain, | SDGSFFLYSKLTVDKSRWQQGNVFSCSVMHEALHNHYTQKSLSLSPGKFW | |
| P2A, IL-15Rα, P2A, | VLVVVGGVLACYSLLVTVAFIIFWV [symbol] [symbol] | |
| IL-15 | [symbol] RVKFSRSADAPAYQQGQNQLYNELNLGRREEYDV | |
| | LDKRRGRDPEMGGKPRRKNPQEGLYNELQKDKMAEAYSEIGMKGERRRGK | |
| | GHDGLYQGLSTATKDTYDALHMQALPPRGSGATNFSLLKQAGDVEENPGP | |
| | GRGLLRGLWPLHIVLWTRIASTIPPHVQKSVNNDMIVTDNNGAVKFPQLC | |
| | KFCDVRFSTCDNQKSCMSNCSITSICEKPQEVCVAVWRKNDENITLETVC | |
| | HDPKLPYHDFILEDAASPKCIMKEKKKPGETFFMCSCSSDECNDNIIFSE | |
| | EYNTSNPDLLLVIFQVTGISLLPPLGVAISVIIIFYCYRVNRQQKLSSGS | |
| | GATNFSLLKQAGDVEENPGPAPRRARGCRTLGLPALLLLLLLRPPATRGI | |
| | TCPPPMSVEHADIWVKSYSLYSRERYICNSGFKRKAGTSSLTECVLNKAT | |
| | NVAHWTTPSLKCIRDPALVHQRPAPPSTVTTAGVTPQPESLSPSGKEPAA | |
| | SSPSSNNTAATTAAIVPGSQLMPSKSPSTGTTEISSHESSHGTPSQTTAK | |
| | NWELTASASHQPPGVYPQGHSDTTVAISTSTVLLCGLSAVSLLACYLKSR | |
| | QTPPLASVEMEAMEALPVTWGTSSRDEDLENCSHHLGSGATNFSLLKQAG | |
| | DVEENPGPRISKPHLRSISIQCYLCLLLNSHFLTEAGIHVFILGCFSAGL | |
| | PKTEANWVNVISDLKKIEDLIQSMHIDATLYTESDVHPSCKVTAMKCFLL | |
| | ELQVISLESGDASIHDTVENLIILANNSLSSNGNVTESGCKECEELEEKN | |
| | IKEFLQSFVHIVQMFINTS | |

### 6. CAR Expression Levels

[0312] The present disclosure provides a population of engineered NK cells, wherein a plurality of the engineered NK cells of the population comprise any chimeric stimulatory receptor (CAR) disclosed herein. The present disclosure also provides a composition comprising a population of NK cells, wherein a plurality of the NK cells of the population comprise a non-naturally occurring CAR comprising, consisting essentially of, or consisting of: a) an extracellular domain comprising an antigen recognition domain, b) a transmembrane domain, and c) an intracellular domain (e.g., a CAR described herein). The disclosure also provides a composition comprising a population of NK cells, wherein a plurality of the NK cells of the population comprise a non-naturally occurring CAR comprising, consisting essentially of, or consisting of: a) an antigen recognition domain, b) a hinge domain, c) a transmembrane domain, d) a costimulatory domain and e) an activation domain. In some embodiments, at least 5%, at least 10%, at least 15%, at least 20%, at least 25%, at least 30%, at least 35%, at least 40%, at least 45%, at least 50%, at least 55%, at least 60%, at least 65%, at least 70%, at least 75%, at least 80%, at least 85%, at least 90%, at least 95%, at least 96%, at least 97%, at least 98%, at least 99%, or 100% of the population comprise the CAR. In some embodiments, the CAR polypeptide is expressed at a copy number of at least 1, 2, 3, 4, 5, 6, 7, 8, 9, 10, 20, 30, 40, 50, 60, 70, 80, 90 or 100 copies per cell. In some embodiments, the nucleic acid encoding the CAR is integrated into the genome at a copy number of at least 1, 2, 3, 4, 5, 6, 7, 8, 9, 10, 20 or 30 copies per cell.

[0313] In some embodiments, the NK cells expressing a CAR are further engineered to express at least one cytokine. In some embodiments, at least 5%, at least 10%, at least 15%, at least 20%, at least 25%, at least 30%, at least 35%, at least 40%, at least 45%, at least 50%, at least 55%, at least 60%, at least 65%, at least 70%, at least 75%, at least 80%, at least 85%, at least 90%, at least 95%, at least 96%, at least 97%, at least 98%, at least 99%, or 100% of the population comprise the membrane bound cytokine or a cytokine that is co-expressed with a cytokine receptor. In some embodiments, the membrane bound cytokine or cytokine that is co-expressed with a cytokine receptor is expressed at a copy number of at least 1, 2, 3, 4, 5, 6, 7, 8, 9, 10, 20, 25, 30, 40, 50, 60, 70, 75, 80, 90 or 100 copies of polypeptide per cell. In some embodiments, the nucleic acid encoding the membrane bound cytokine or cytokine that is co-expressed with a cytokine receptor is integrated into the genome at a copy number of at least 1, 2, 3, 4, 5, 6, 7, 8, 9, 10, 20 or 30 copies per cell. In some embodiments, the membrane bound cytokine is IL-21. In some embodiments, the membrane bound cytokine is IL-18. In some embodiments, the membrane bound cytokine is IL-12. In some embodiments, the membrane bound cytokine is IL-15. In some embodiments, IL-21 is co-expressed with IL-21R. In some embodiments, IL-18 is co-expressed with IL-18Ra. In some embodiments, IL-12 is co-expressed with IL-12R131. In some embodiments, IL-15 is co-expressed with IL-15RA.

[0314] In some embodiments, the NK cells expressing a CAR are further engineered to express CCR4. In some embodiments, at least 5%, at least 10%, at least 15%, at least 20%, at least 25%, at least 30%, at least 35%, at least 40%, at least 45%, at least 50%, at least 55%, at least 60%, at least 65%, at least 70%, at least 75%, at least 80%, at least 85%, at least 90%, at least 95%, at least 96%, at least 97%, at least 98%, at least 99%, or 100% of the population comprise the CCR4. In some embodiments, the CCR4 is expressed at a copy number of at least 1, 2, 3, 4, 5, 6, 7, 8, 9, 10, 20, 25, 30, 40, 50, 60, 70, 75, 80, 90 or 100 copies of polypeptide per cell. In some embodiments, the nucleic acid encoding the CCR4 is integrated into the genome at a copy number of at least 1, 2, 3, 4, 5, 6, 7, 8, 9, 10, 20 or 30 copies per cell.

[0315] In some embodiments, the NK cells expressing a CAR are further engineered to express a TGFbeta signal converter. In some embodiments, at least 5%, at least 10%, at least 15%, at least 20%, at least 25%, at least 30%, at least 35%, at least 40%, at least 45%, at least 50%, at least 55%, at least 60%, at least 65%, at least 70%, at least 75%, at least 80%, at least 85%, at least 90%, at least 95%, at least 96%, at least 97%, at least 98%, at least 99%, or 100% of the population comprise the TGFbeta signal converter. In some embodiments, the TGFbeta signal converter is expressed at a copy number of at least 1, 2, 3, 4, 5, 6, 7, 8, 9, 10, 20, 25, 30, 40, 50, 60, 70, 75, 80, 90 or 100 copies of polypeptide per cell. In some embodiments, the nucleic acid encoding the TGFbeta signal converter is integrated into the genome at a copy number of at least 1, 2, 3, 4, 5, 6, 7, 8, 9, 10, 20 or 30 copies per cell.

[0316] In some embodiments, the ratio of the copy number of CAR: IL15 is about 1:1, 2:1, 3:1, 4:1, 5:1, 6:1, 7:1, 8:1, 9:1, 10:1, 1:2, 1:3, 1:4, 1:5, 1:6, 1:7, 1:8, 1:9 or 1:10. In some embodiments, the ratio of the copy number of CAR:mbIL-12 is about 1:1, 2:1, 3:1, 4:1, 5:1, 6:1, 7:1, 8:1, 9:1, 10:1, 1:2, 1:3, 1:4, 1:5, 1:6, 1:7, 1:8, 1:9 or 1:10. In some embodiments, the ratio of the copy number of CAR:mbIL-21 is about 1:1, 2:1, 3:1, 4:1, 5:1, 6:1, 7:1, 8:1, 9:1, 10:1, 1:2, 1:3, 1:4, 1:5, 1:6, 1:7, 1:8, 1:9 or 1:10. In some embodiments, the ratio of the copy number of CAR:mbIL-18 is about 1:1, 2:1, 3:1, 4:1, 5:1, 6:1, 7:1, 8:1, 9:1, 10:1, 1:2, 1:3, 1:4, 1:5, 1:6, 1:7, 1:8, 1:9 or 1:10. In some embodiments, the ratio of the copy number of CAR:TGFbeta signal converter is about 1:1, 2:1, 3:1, 4:1, 5:1, 6:1, 7:1, 8:1, 9:1, 10:1, 1:2, 1:3, 1:4, 1:5, 1:6, 1:7, 1:8, 1:9 or 1:10. In some embodiments, the ratio of the copy number of CAR:CCR4 is about 1:1, 2:1, 3:1, 4:1, 5:1, 6:1, 7:1, 8:1, 9:1, 10:1, 1:2, 1:3, 1:4, 1:5, 1:6, 1:7, 1:8, 1:9 or 1:10. In some embodiments, the ratio of the copy number of CAR:safety switch protein is about 1:1, 2:1, 3:1, 4:1, 5:1, 6:1, 7:1, 8:1, 9:1, 10:1, 1:2, 1:3, 1:4, 1:5, 1:6, 1:7, 1:8, 1:9 or 1:10. In some embodiments, the ratio of the copy number of IL15:IL15Ra is about 1:1, 2:1, 3:1, 4:1, 5:1, 6:1, 7:1, 8:1, 9:1, 10:1, 1:2, 1:3, 1:4, 1:5, 1:6, 1:7, 1:8, 1:9 or 1:10.

### 7. Antigens

[0317] In some embodiments, provided herein are cells (e.g., NK cells) expressing an anti-CD70 CAR and a second CAR targeting an antigen that is not CD70.

[0318] Among the antigens that may be targeted by the genetically engineered antigen receptors are those expressed in the context of a disease, condition, or cell type to be targeted via the adoptive cell therapy. Among the diseases and conditions are proliferative, neoplastic, and malignant diseases and disorders, including cancers and tumors, including hematologic cancers, cancers of the immune system, such as lymphomas, leukemias, and/or myelomas, such as B, T, and myeloid leukemias, lymphomas, and multiple myelomas. In some embodiments, the antigen is selectively expressed or overexpressed on cells of the disease or condition, e.g., the tumor or pathogenic cells, as compared to normal or non-targeted cells or tissues. In other embodiments, the antigen is expressed on normal cells and/or is expressed on the engineered cells.

[0319] Any suitable antigen may find use in the present method. Exemplary antigens include, but are not limited to, antigenic molecules from infectious agents, glycosylated antigens, TnAntigens, auto-/self-antigens, tumor-/cancer-associated antigens, and tumor neoantigens (Linnemann et al. Nat. Med. 21(1):81-5, 2015). In particular aspects, the antigens include BCMA, GPRC5D, CD138, CS1, CD19, CD20, CD22, CD79a, CD79b, CD37, CXCR5, CD70, CD96, CD33, CD123, CLEC12a, ADGRE2 or LILRB2. In particular aspects, the antigens for targeting by two or more antigen recognition domains include, but are not limited to CD70 and CD33 (e.g., for AML), CD70 and CD123 (e.g., for AML), CD70 and CLL1 (e.g., for AML), CD70 and CD96 (e.g., for AML); CD70 and CD19 (e.g., for B cell malignancies); CD70 and CD22 (e.g., for B cell malignancies); CD70 and CD20 (e.g., for B cell malignancies); CD70 and CD79a (e.g., for B cell malignancies); CD70 and CD79b (e.g., for B cell malignancies); CD70 and BCMA (e.g., for multiple myeloma); CD70 and GPRC5D (e.g., for multiple myeloma); CD70 and CD138 (e.g., for multiple myeloma); CD70 and CD96 (e.g., for RCC); CD70 and HAVCR1 (e.g., for RCC); CD70 and EGFR (e.g., for RCC). The sequences for these antigens are known in the art, for example, CD33 (e.g., Accession No. NM_001772.4); CD123 (e.g., Accession No. NC 000023.11); CLL1 (e.g., Accession No. NM_138337.6); CD96 (e.g., Accession No. NM_198196.3); CD96 (e.g., Accession No. NM_198196.3); HAVCR1 (e.g., Accession No. NM_001173393.3); EGFR (e.g., Accession No. NM_005228.5); CD19 (e.g., Accession No. NG 007275.1); CD22 (e.g., Accession No. NM_001771.4); CD20 (e.g., Accession No. NM_152866.3); CD79a (e.g., Accession No. NM_001783.4); CD79b (e.g., Accession No. NM_001039933.3); CD37 (e.g., Accession No. NM_001774.3); CXCR5 (e.g., Accession No. NM_001716.5); BCMA (e.g., Accession No. NM_001192.3); GPRC5D (e.g., Accession No. NM_018654.1); and CD138 (e.g., Accession No. NM_001006946.1).

[0320] Tumor-associated antigens may be derived from prostate, breast, colorectal, lung, pancreatic, renal, mesothelioma, ovarian, or melanoma cancers. Exemplary tumor-associated antigens or tumor cell-derived antigens include MAGE 1, MAGE 3, and MAGE 4 (or other MAGE antigens such as those disclosed in PCT Publication No. WO 99/40188); PRAME; BAGE; RAGE, Lage (also known as NY ESO 1); SAGE; and HAGE or GAGE. These non-limiting examples of tumor antigens are expressed in a wide range of tumor types such as melanoma, lung carcinoma, sarcoma, and bladder carcinoma. See, e.g., U.S. Pat. No. 6,544,518. Prostate cancer tumor-associated antigens include, for example, prostate specific membrane antigen (PSMA), prostate-specific antigen (PSA), prostatic acid phosphates, NKX3.1, and six-transmembrane epithelial antigen of the prostate (STEAP).

[0321] Other tumor associated antigens include Plu-1, HASH-1, HasH-2, Cripto and Criptin. Additionally, a tumor antigen may be a self peptide hormone, such as whole length gonadotrophin hormone releasing hormone (GnRH), a short 10 amino acid long peptide, useful in the treatment of many cancers.

[0322] Tumor antigens include tumor antigens derived from cancers that are characterized by tumor-associated antigen expression, such as HER-2/neu expression. Tumor-associated antigens of interest include lineage-specific tumor antigens such as the melanocyte-melanoma lineage antigens MART-1/Melan-A, gp100, gp75, mda-7, tyrosinase and tyrosinase-related protein. Illustrative tumor-associated antigens include, but are not limited to, tumor antigens derived from or comprising any one or more of, p53, Ras, c-Myc, cytoplasmic serine/threonine kinases (e.g., A-Raf, B-Raf, and C-Raf, cyclin-dependent kinases), MAGE-A1, MAGE-A2, MAGE-A3, MAGE-A4, MAGE-A6, MAGE-A10, MAGE-A12, MART-1, BAGE, DAM-6, -10, GAGE-1, -2, -8, GAGE-3, -4, -5, -6, -7B, NA88-A, MART-1, MC1R, gp100, PSA, PSM, Tyrosinase, TRP-1, TRP-2, ART-4, CAMEL, CEA, Cyp-B, hTERT, hTRT, iCE, MUC1, MUC2, Phosphoinositide 3-kinases (PI3Ks), TRK receptors, PRAME, P15, RU1, RU2, SART-1, SART-3, Wilms' tumor antigen (WT1), AFP, -catenin/m, Caspase-8/m, CEA, CDK-4/m, ELF2M, GnT-V, G250, HSP70-2M, HST-2, KIAA0205, MUM-1, MUM-2, MUM-3, Myosin/m, RAGE, SART-2, TRP-2/INT2, 707-AP, Annexin II, CDC27/m, TPI/mbcr-abl, BCR-ABL, interferon regulatory factor 4 (IRF4), ETV6/AML, LDLR/FUT, Pml/RAR, Tumor-associated calcium signal transducer 1 (TACSTD1) TACSTD2, receptor tyrosine kinases (e.g., Epidermal Growth Factor receptor (EGFR) (in particular, EGFRvIII), platelet derived growth factor receptor (PDGFR), vascular endothelial growth factor receptor (VEGFR)), cytoplasmic tyrosine kinases (e.g., src-family, syk-ZAP70 family), integrin-linked kinase (ILK), signal transducers and activators of transcription STAT3, STATS, and STATE, hypoxia inducible factors (e.g., HIF-1 and HIF-2), Nuclear Factor-Kappa B (NF-B), Notch receptors (e.g., Notch1-4), c-Met, mammalian targets of rapamycin (mTOR), WNT, extracellular signal-regulated kinases (ERKs), and their regulatory subunits, PMSA, PR-3, MDM2, Mesothelin, renal cell carcinoma-5T4, SM22-alpha, carbonic anhydrases I (CAI) and IX (CAIX) (also known as G250), STEAD, TEL/AML1, GD2, proteinase3, hTERT, sarcoma translocation breakpoints, EphA2, ML-IAP, EpCAM, ERG (TMPRSS2 ETS fusion gene), NA17, PAX3, ALK, androgen receptor, cyclin B 1, polysialic acid, MYCN, RhoC, GD3, fucosyl GM1, mesothelian, PSCA, sLe, PLAC1, GM3, BORIS, Tn, GLoboH, NY-BR-1, RGsS, SART3, STn, PAX5, OY-TES 1, sperm protein 17, LCK, HMWMAA, AKAP-4, SSX2, XAGE 1, B7H3, legumain, TIE2, Page4, MAD-CT-1, FAP, MAD-CT-2, fos related antigen 1, CBX2, CLDN6, SPANX, TPTE, ACTL8, ANKRD30A, CDKN2A, MAD2L1, CTAG1B, SUNC1, LRRN1 and idiotype.

[0323] Antigens may include epitopic regions or epitopic peptides derived from genes mutated in tumor cells or from genes transcribed at different levels in tumor cells compared to normal cells, such as telomerase enzyme, survivin, mesothelin, mutated ras, bcr/abl rearrangement, Her2/neu, mutated or wild-type p53, cytochrome P450 1B 1, and abnormally expressed intron sequences such as N-acetylglucosaminyltransferase-V; clonal rearrangements of immunoglobulin genes generating unique idiotypes in myeloma and B cell lymphomas; tumor antigens that include epitopic regions or epitopic peptides derived from oncoviral processes, such as human papilloma virus proteins E6 and E7; Epstein bar virus protein LMP2; nonmutated oncofetal proteins with a tumor-selective expression, such as carcinoembryonic antigen and alpha-fetoprotein.

[0324] In other embodiments, an antigen is obtained or derived from a pathogenic microorganism or from an opportunistic pathogenic microorganism (also called herein an infectious disease microorganism), such as a virus, fungus, parasite, and bacterium. In certain embodiments, antigens derived from such a microorganism include full-length proteins.

[0325] Illustrative pathogenic organisms whose antigens are contemplated for use in the method described herein include human immunodeficiency virus (HIV), herpes simplex virus (HSV), respiratory syncytial virus (RSV), cytomegalovirus (CMV), Epstein-Barr virus (EBV), Influenza A, B, and C, vesicular stomatitis virus (VSV), vesicular stomatitis virus (VSV), polyomavirus (e.g., BK virus and JC virus), adenovirus, Staphylococcus species including Methicillin-resistant Staphylococcus aureus (MRSA), and Streptococcus species including Streptococcus pneumoniae. As would be understood by the skilled person, proteins derived from these and other pathogenic microorganisms for use as antigen as described herein and nucleotide sequences encoding the proteins may be identified in publications and in public databases such as GENBANK, SWISS-PROT, and TREMBL.

[0326] Antigens derived from human immunodeficiency virus (HIV) include any of the HIV virion structural proteins (e.g., gp120, gp41, p17, p24), protease, reverse transcriptase, or HIV proteins encoded by tat, rev, nef, vif, vpr and vpu.

[0327] Antigens derived from herpes simplex virus (e.g., HSV 1 and HSV2) include, but are not limited to, proteins expressed from HSV late genes. The late group of genes predominantly encodes proteins that form the virion particle. Such proteins include the five proteins from (UL) which form the viral capsid: UL6, UL18, UL35, UL38 and the major capsid protein UL19, UL45, and UL27, each of which may be used as an antigen as described herein. Other illustrative HSV proteins contemplated for use as antigens herein include the ICP27 (HI, H2), glycoprotein B (gB) and glycoprotein D (gD) proteins. The HSV genome comprises at least 74 genes, each encoding a protein that could potentially be used as an antigen.

[0328] Antigens derived from cytomegalovirus (CMV) include CMV structural proteins, viral antigens expressed during the immediate early and early phases of virus replication, glycoproteins I and III, capsid protein, coat protein, lower matrix protein pp65 (ppUL83), p52 (ppUL44), IE1 and 1E2 (UL123 and UL122), protein products from the cluster of genes from UL128-UL150, envelope glycoprotein B (gB), gH, gN, and pp150. As would be understood by the skilled person, CMV proteins for use as antigens described herein may be identified in public databases such as GENBANK, SWISS-PROT, and TREMBL.

[0329] Antigens derived from Epstein-Ban virus (EBV) that are contemplated for use in certain embodiments include EBV lytic proteins gp350 and gp110, EBV proteins produced during latent cycle infection including Epstein-Ban nuclear antigen (EBNA)-1, EBNA-2, EBNA-3A, EBNA-3B, EBNA-3C, EBNA-leader protein (EBNA-LP) and latent membrane proteins (LMP)-1, LMP-2A and LMP-2B.

[0330] Antigens derived from respiratory syncytial virus (RSV) that are contemplated for use herein include any of the eleven proteins encoded by the RSV genome, or antigenic fragments thereof: NS 1, NS2, N (nucleocapsid protein), M (Matrix protein) SH, G and F (viral coat proteins), M2 (second matrix protein), M2-1 (elongation factor), M2-2 (transcription regulation), RNA polymerase, and phosphoprotein P.

[0331] Antigens derived from vesicular stomatitis virus (VSV) that are contemplated for use include any one of the five major proteins encoded by the VSV genome, and antigenic fragments thereof: large protein (L), glycoprotein (G), nucleoprotein (N), phosphoprotein (P), and matrix protein (M).

[0332] Antigens derived from an influenza virus that are contemplated for use in certain embodiments include hemagglutinin (HA), neuraminidase (NA), nucleoprotein (NP), matrix proteins M1 and M2, NS1, NS2 (NEP), PA, PB1, PB1-F2, and PB2.

[0333] Exemplary viral antigens also include, but are not limited to, adenovirus polypeptides, alphavirus polypeptides, calicivirus polypeptides (e.g., a calicivirus capsid antigen), coronavirus polypeptides, distemper virus polypeptides, Ebola virus polypeptides, enterovirus polypeptides, flavivirus polypeptides, hepatitis virus (AE) polypeptides (a hepatitis B core or surface antigen, a hepatitis C virus E1 or E2 glycoproteins, core, or non-structural proteins), herpesvirus polypeptides (including a herpes simplex virus or varicella zoster virus glycoprotein), infectious peritonitis virus polypeptides, leukemia virus polypeptides, Marburg virus polypeptides, orthomyxovirus polypeptides, papilloma virus polypeptides, parainfluenza virus polypeptides (e.g., the hemagglutinin and neuraminidase polypeptides), paramyxovirus polypeptides, parvovirus polypeptides, pestivirus polypeptides, picorna virus polypeptides (e.g., a poliovirus capsid polypeptide), pox virus polypeptides (e.g., a vaccinia virus polypeptide), rabies virus polypeptides (e.g., a rabies virus glycoprotein G), reovirus polypeptides, retrovirus polypeptides, and rotavirus polypeptides.

[0334] In certain embodiments, the antigen may be bacterial antigens. In certain embodiments, a bacterial antigen of interest may be a secreted polypeptide. In other certain embodiments, bacterial antigens include antigens that have a portion or portions of the polypeptide exposed on the outer cell surface of the bacteria.

[0335] Antigens derived from Staphylococcus species including Methicillin-resistant Staphylococcus aureus (MRSA) that are contemplated for use include virulence regulators, such as the Agr system, Sar and Sae, the Arl system, Sar homologues (Rot, MgrA, SarS, SarR, SarT, SarU, SarV, SarX, SarZ and TcaR), the Srr system and TRAP. Other Staphylococcus proteins that may serve as antigens include Clp proteins, HtrA, MsrR, aconitase, CcpA, SvrA, Msa, CfvA and CfvB (see, e.g., Staphylococcus: Molecular Genetics, 2008 Caister Academic Press, Ed. Jodi Lindsay). The genomes for two species of Staphylococcus aureus (N315 and Mu50) have been sequenced and are publicly available, for example at PATRIC (PATRIC: The VBI PathoSystems Resource Integration Center, Snyder et al., 2007). As would be understood by the skilled person, Staphylococcus proteins for use as antigens may also be identified in other public databases such as GENBANK, SWISS-PROT, and TREMBL.

[0336] Antigens derived from Streptococcus pneumoniae that are contemplated for use in certain embodiments described herein include pneumolysin, PspA, choline-binding protein A (CbpA), NanA, NanB, SpnHL, PavA, LytA, Pht, and pilin proteins (RrgA; RrgB; RrgC). Antigenic proteins of Streptococcus pneumoniae are also known in the art and may be used as an antigen in some embodiments (see, e.g., Zysk et al. Infect. Immun. 68(6):3740-3, 2000). The complete genome sequence of a virulent strain of Streptococcus pneumoniae has been sequenced and, as would be understood by the skilled person, S. pneumoniae proteins for use herein may also be identified in other public databases such as GENBANK, SWISS-PROT, and TREMBL. Proteins of particular interest for antigens according to the present disclosure include virulence factors and proteins predicted to be exposed at the surface of the pneumococci (see, e.g., Frolet et al. BMC Microbiol. 10:190, 2010).

[0337] Examples of bacterial antigens that may be used as antigens include, but are not limited to, Actinomyces polypeptides, Bacillus polypeptides, Bacteroides polypeptides, Bordetella polypeptides, Bartonella polypeptides, Borrelia polypeptides (e.g., B. burgdorferi OspA), Brucella polypeptides, Campylobacter polypeptides, Capnocytophaga polypeptides, Chlamydia polypeptides, Corynebacterium polypeptides, Coxiella polypeptides, Dermatophilus polypeptides, Enterococcus polypeptides, Ehrlichia polypeptides, Escherichia polypeptides, Francisella polypeptides, Fusobacterium polypeptides, Haemobartonella polypeptides, Haemophilus polypeptides (e.g., H. influenzae type b outer membrane protein), Helicobacter polypeptides, Klebsiella polypeptides, L-form bacteria polypeptides, Leptospira polypeptides, Listeria polypeptides, Mycobacteria polypeptides, Mycoplasma polypeptides, Neisseria polypeptides, Neorickettsia polypeptides, Nocardia polypeptides, Pasteurella polypeptides, Peptococcus polypeptides, Peptostreptococcus polypeptides, Pneumococcus polypeptides (i.e., S. pneumoniae polypeptides) (see description herein), Proteus polypeptides, Pseudomonas polypeptides, Rickettsia polypeptides, Rochalimaea polypeptides, Salmonella polypeptides, Shigella polypeptides, Staphylococcus polypeptides, group A Streptococcus polypeptides (e.g., S. pyogenes M proteins), group B Streptococcus (S. agalactiae) polypeptides, Treponema polypeptides, and Yersinia polypeptides (e.g., Y. pestis Fl and V antigens).

[0338] Examples of fungal antigens include, but are not limited to, Absidia polypeptides, Acremonium polypeptides, Alternaria polypeptides, Aspergillus polypeptides, Basidiobolus polypeptides, Bipolaris polypeptides, Blastomyces polypeptides, Candida polypeptides, Coccidioides polypeptides, Conidiobolus polypeptides, Cryptococcus polypeptides, Curvalaria polypeptides, Epidermophyton polypeptides, Exophiala polypeptides, Geotrichum polypeptides, Histoplasma polypeptides, Madurella polypeptides, Malassezia polypeptides, Microsporum polypeptides, Moniliella polypeptides, Mortierella polypeptides, Mucor polypeptides, Paecilomyces polypeptides, Penicillium polypeptides, Phialemonium polypeptides, Phialophora polypeptides, Prototheca polypeptides, Pseudallescheria polypeptides, Pseudomicrodochium polypeptides, Pythium polypeptides, Rhino sporidium polypeptides, Rhizopus polypeptides, Scolecobasidium polypeptides, Sporothrix polypeptides, Stemphylium polypeptides, Trichophyton polypeptides, Trichosporon polypeptides, and Xylohypha polypeptides.

[0339] Examples of protozoan parasite antigens include, but are not limited to, Babesia polypeptides, Balantidium polypeptides, Besnoitia polypeptides, Cryptosporidium polypeptides, Eimeria polypeptides, Encephalitozoon polypeptides, Entamoeba polypeptides, Giardia polypeptides, Hammondia polypeptides, Hepatozoon polypeptides, Isospora polypeptides, Leishmania polypeptides, Microsporidia polypeptides, Neospora polypeptides, Nosema polypeptides, Pentatrichomonas polypeptides, Plasmodium polypeptides. Examples of helminth parasite antigens include, but are not limited to, Acanthocheilonema polypeptides, Aelurostrongylus polypeptides, Ancylostoma polypeptides, Angiostrongylus polypeptides, Ascaris polypeptides, Brugia polypeptides, Bunostomum polypeptides, Capillaria polypeptides, Chabertia polypeptides, Cooperia polypeptides, Crenosoma polypeptides, Dictyocaulus polypeptides, Dioctophyme polypeptides, Dipetalonema polypeptides, Diphyllobothrium polypeptides, Diplydium polypeptides, Dirofilaria polypeptides, Dracunculus polypeptides, Enterobius polypeptides, Filaroides polypeptides, Haemonchus polypeptides, Lagochilascaris polypeptides, Loa polypeptides, Mansonella polypeptides, Muellerius polypeptides, Nanophyetus polypeptides, Necator polypeptides, Nematodirus polypeptides, Oesophagostomum polypeptides, Onchocerca polypeptides, Opisthorchis polypeptides, Ostertagia polypeptides, Parafilaria polypeptides, Paragonimus polypeptides, Parascaris polypeptides, Physaloptera polypeptides, Protostrongylus polypeptides, Setaria polypeptides, Spirocerca polypeptides Spirometra polypeptides, Stephanofilaria polypeptides, Strongyloides polypeptides, Strongylus polypeptides, Thelazia polypeptides, Toxascaris polypeptides, Toxocara polypeptides, Trichinella polypeptides, Tricho strongylus polypeptides, Trichuris polypeptides, Uncinaria polypeptides, and Wuchereria polypeptides. (e.g., P. falciparum circumsporozoite (PfCSP)), sporozoite surface protein 2 (PfSSP2), carboxyl terminus of liver state antigen 1 (PfLSA1 c-term), and exported protein 1 (PfExp-1), Pneumocystis polypeptides, Sarcocystis polypeptides, Schistosoma polypeptides, Theileria polypeptides, Toxoplasma polypeptides, and Trypanosoma polypeptides.

[0340] Examples of ectoparasite antigens include, but are not limited to, polypeptides (including antigens as well as allergens) from fleas; ticks, including hard ticks and soft ticks; flies, such as midges, mosquitoes, sand flies, black flies, horse flies, horn flies, deer flies, tsetse flies, stable flies, myiasis-causing flies and biting gnats; ants; spiders, lice; mites; and true bugs, such as bed bugs and kissing bugs.

### 8. Safety Switch Proteins

[0341] Although cellular therapies hold great promise for the treatment of human disease, significant toxicities from the cells themselves or from their transgene products have hampered clinical investigation. In some embodiments described herein, immune effector cells (e.g., NK cells) comprising a CAR described herein that have been infused into a mammalian subject, e.g., a human, can be ablated in order to regulate the effect of such immune effector cells should toxicity arise from their use. In some embodiments, the immune cells of the present disclosure may comprise one or more safety switch proteins (e.g., caspase-9, inducible FAS (iFAS), and inducible caspase-9 (icasp9)) or kill switch genes.

[0342] As used herein, the term “safety switch protein,” “suicide protein” or “kill switch protein” refers to an engineered protein designed to prevent potential toxicity or otherwise adverse effects of a cell therapy. In some instances, the safety switch protein expression is conditionally controlled to address safety concerns for transplanted engineered cells that have permanently incorporated the gene encoding the safety switch protein into its genome. This conditional regulation could be variable and might include control through a small molecule-mediated post-translational activation and tissue-specific and/or temporal transcriptional regulation. The safety switch could mediate induction of apoptosis, inhibition of protein synthesis or DNA replication, growth arrest, transcriptional and post-transcriptional genetic regulation and/or antibody-mediated depletion. In some instances, the safety switch protein is activated by an exogenous molecule, e.g., a prodrug, that, when activated, triggers apoptosis and/or cell death of a therapeutic cell.

[0343] The term “suicide gene” or “kill switch gene” as used herein is defined as a gene which, upon administration of a prodrug, effects transition of a gene product to a compound which kills its host cell. Examples of suicide gene/prodrug combinations which may be used include, but are not limited to inducible caspase 9 (iCASP9) and rimiducid; RQR8 and rituximab; truncated version of EGFR variant III (EGFRv3) and cetuximab; Herpes Simplex Virus-thymidine kinase (HSV-tk) and ganciclovir, acyclovir, or FIAU; oxidoreductase and cycloheximide; cytosine deaminase and 5-fluorocytosine; thymidine kinase thymidilate kinase (Tdk::Tmk) and AZT; and deoxycytidine kinase and cytosine arabinoside. The E. coli purine nucleoside phosphorylase, a so-called suicide gene which converts the prodrug 6-methylpurine deoxyriboside to toxic purine 6-methylpurine. Other examples of suicide genes used with prodrug therapy are the E. coli cytosine deaminase gene and the HSV thymidine kinase gene.

[0344] Exemplary suicide genes include but are not limited to inducible caspase 9 (or caspase 3 or 7), CD20, CD52, EGFRt, or, thymidine kinase, cytosine deaminase, HER1 and any combination thereof. Further suicide genes known in the art that may be used in the present disclosure include Purine nucleoside phosphorylase (PNP), cytochrome p450 enzymes (CYP), carboxypeptidases (CP), carboxylesterase (CE), nitroreductase (NTR), guanine ribosyltransferase (XGRTP), glycosidase enzymes, methionine-γ-lyase (MET), and thymidine phosphorylase (TP).

### 10. NK Cell Activity

[0345] In some embodiments, a population of genetically engineered NK cells as disclosed herein exhibits NK cell functions (e.g., effector functions). In some embodiments, the population is cytotoxic to CD70-expressing cells (e.g., CD70-positive tumor cells). In some embodiments, the population exhibits directed secretion of cytolytic granules or engagement of death domain-containing receptors. In some embodiments, the cytolytic granules comprise perforin and/or granzymes. In some embodiments, a NK cell function is degranulation (e.g., CD107a expression), activation (e.g., CD69 production), cytokine production (e.g., TNFalpha or IFNgamma production), target cell line killing or anti-tumor efficacy in mouse models. Illustrative assays for measuring NK cell cytotoxicity and CD107a (granule release) are provided in Li et al., Cell Stem Cell 23:181-192, 2018. In some embodiments, the population exhibits one or more NK cell effector functions at a level that is least 3-4-fold higher than the functions exhibited by a population of NK cells not expressing the first CAR.

### III. Methods

[0346] The NK cells for use in the compositions and methods described herein are derived from human peripheral blood mononuclear cells (PBMCs), mobilized peripheral blood stem cells (PBSCs), unstimulated leukapheresis products, human embryonic stem cells (hESCs), induced pluripotent stem cells (iPSCs), mesenchymal stem cells (MSCs), hematopoietic stem cells (HSCs), bone marrow, CD34⁺ cells, or umbilical cord blood (CB), by methods well known in the art (see, e.g., Lowe et al. (2016) Methods Mol. Biol. 1441: 241-51, incorporated herein by reference). In some embodiments, the NK cells are isolated from peripheral blood, CB, bone marrow, or stem cells. The NK cells may be allogeneic or autologous. For example, in some embodiments, a starting population of NK cells for use in the methods described herein is obtained by isolating mononuclear cells using Ficoll density gradient centrifugation and subsequently depleting cells expressing CD3, CD14, and/or CD19. NK cells in the population can be quantified based on the amount of CD56⁺ or CD3⁻/CD56⁺ cells in the resulting population of cells.

[0347] Provided herein is a method of making a population of genetically engineered NK cells, the method comprising: (a) providing a population of NK cells; (b) contacting the population of NK cells with a CD70 inhibitor; and (c) expanding the population of NK cells in vitro. In some embodiments, the CD70 inhibitor comprises a small interfering RNA (siRNA) that targets CD70 mRNA, a short hairpin RNA (shRNA) that targets CD70 mRNA, a nucleic acid encoding a siRNA that targets CD70 mRNA, a nucleic acid encoding an shRNA that targets CD70 mRNA, or a combination of any of the foregoing. In some embodiments, the CD70 inhibitor comprises an RNA-guided endonuclease and a guide RNA (gRNA) targeting a CD70 gene. In some embodiments, the CD70 inhibitor comprises a Protein Expression Blocker (PEBL) or a nucleic acid encoding a PEBL, wherein the PEBL comprises a first antigen recognition domain that specifically binds human CD70 and one or more of a localizing domain, an intracellular retention domain and an endoplasmic reticulum (ER) retention domain. In some embodiments, the CD70 inhibitor is an antagonistic anti-CD70 antibody or an antigen-binding fragment thereof.

[0348] In some embodiments, (b) contacting the population of NK cells with a CD70 inhibitor may occur prior to (c) expanding the population of NK cells in vitro. In some embodiments, (b) contacting the population of NK cells with a CD70 inhibitor may occur after (c) expanding the population of NK cells in vitro. In some embodiments, (b) contacting the population of NK cells with a CD70 inhibitor may occur concurrently with (c) expanding the population of NK cells in vitro. In some embodiments, (b) contacting the population of NK cells with a CD70 inhibitor may occur prior to, concurrently and/or after (c) expanding the population of NK cells in vitro.

[0349] In some embodiments, step (b) contacting the population of NK cells with a CD70 inhibitor occurs at least about 1 day, about 2 days, about 3 days, about 4 days, about 5 days, about 6 days, about 7 days, about 8 days, about 9 days, about 10 days, about 11 days, 12 days, about 13 days, or about 14 days prior to expanding the population of NK cells in vitro. In some embodiments, the contacting of the population of NK cells with a CD70 inhibitor occurs at least about 1 day, about 2 days, about 3 days, about 4 days, about 5 days, about 6 days, about 7 days, about 8 days, about 9 days, about 10 days, about 11 days, 12 days, about 13 days, or about 14 days after the expanding of the population of NK cells in vitro.

[0350] In some embodiments, the population of NK cells is a population of human NK cells. In some embodiments, the population of NK cells exhibits at least about 25% greater cell expansion compared to a population of NK cells that is not contacted with the CD70 inhibitor. In some embodiments, the population of NK cells exhibits at least about 30%, about 40%, about 50%, about 60%, about 70%, about 80%, about 90% or about 100% greater cell expansion compared to a population of NK cells that is expanded under the same conditions but is not contacted with the CD70 inhibitor. In some embodiments, the increased expansion results from an increased level of cell proliferation in culture in the population of NK cells contacted with the CD70 inhibitor. In some embodiments, the increased expansion results from a decreased level of cell death in culture in the population of NK cells contacted with the CD70 inhibitor.

[0351] In some embodiments, the method of making a population of genetically engineered M (cells, further comprises (d) contacting the population of NK cells with a polynucleotide (e.g., a transposon) encoding a chimeric antigen receptor (CAR) described herein under conditions sufficient to transfer the polynucleotide across a cell membrane of at least one NK cell in the population of NK cells, wherein the first CAR comprises: (i) an extracellular domain comprising any antigen recognition domain that specifically binds human CD70 described herein; (ii) a transmembrane domain described herein; and (iii) an intracellular domain described herein.

[0352] In some embodiments, step (d) is performed prior to step (b). In some embodiments, step (d) is performed concurrently with step (b) (e.g., as a single-step process). In some embodiments, step (d) is performed after step (b). In some embodiments, step (d) is performed after step (c).

[0353] In some embodiments, step (d) occurs at least about 1 day, about 2 days, about 3 days, about 4 days, about 5 days, about 6 days, about 7 days, about 8 days, about 9 days, about 10 days, about 11 days, about 12 days, about 13 days, or about 14 days prior to step (b). In some embodiments, step (d) occurs at least about 1 day, about days, about 3 days, about 4 days, about 5 days, about 6 days, about 7 days, about 8 days, about 9 days, about 10 days, about 11 days, about 12 days, about 13 days, or about 14 days after to step (b). In some embodiments, step (d) occurs at least about 1 day, about 2 days, about 3 days, about 4 days, about 5 days, about 6 days, about 7 days, about 8 days, about 9 days, about 10 days, about 11 days, about 12 days, about 13 days, or about 14 days after to step (c).

[0354] In some embodiments, the method of the disclosure further comprises expanding the population of NK cells in vitro after step (d). In some embodiments, the cells are expanded at least one time, at least two times, at least three times, at least four times, at least five times, or more. In some embodiments, the cells are expanded from about 1 day to about 7 days, about 8 days to about 14 days, about 15 days to about 21 days, about 22 days to about 28 days or about 29 days to about 42 days. In some embodiments, the cells are expanded from about 10 days to about 14 days. In some embodiments, the cells are expanded for about 14 days.

[0355] In some embodiments, step (c) comprises expanding the population of NK cells by about 10-100 fold, about 100-1000 fold, about 1000-2000 fold, about 2000-3000 fold, about 3000-4000 fold, about 4000-5000 fold, about 5000-10000 fold, about 10000-20000 fold, 20000-30000 fold, 30000-40000 fold, 40000-50000 fold, 50000-60000 fold or more in culture. In some embodiments, step (c) comprises expanding the population of NK cells by at least 1,000-fold, 2,000-fold, 3,000-fold, 4,000-fold, 5,000-fold, 10,000-fold, 20,000-fold, 30,000-fold, 40,000-fold, 50,000-fold, 60,000-fold, 70,000-fold, 80,000-fold, or more in culture.

[0356] In some embodiments, step (b) and/or step (d) comprises use of a viral vector, electroporation, a transposon/transposase system, a lipid nanoparticle or a charge-altering releasable transporter.

[0357] In some embodiments, step (b) and/or step (d) comprises the use of a viral vector, and wherein the viral vector is a lentivirus, a gamma retrovirus, an adeno-associated virus, an adenovirus, or a herpes simplex virus. In some embodiments, step (b) and/or step (d) comprises the use of a transposon/transposase system described herein.

[0358] In some embodiments, the method of making a population of genetically engineered NK cells, further comprises (e) contacting the population of NK cells with at least one (e.g., one, two, three, or more) additional polynucleotide encoding an additional exogenous polypeptide described herein (e.g., a functional effector element disclosed herein). In some embodiments, step (e) comprises use of a viral vector, electroporation, a transposon/transposase system, a lipid nanoparticle or a charge-altering releasable transporter.

[0359] In some embodiments, a single nucleic acid molecule comprises the first polynucleotide (e.g., a polynucleotide encoding a CAR disclosed herein) and the at least one additional polynucleotide (e.g., a polynucleotide encoding a functional effector element disclosed herein). In some embodiments, a first nucleic acid molecule comprises the first polynucleotide and a second nucleic acid molecule comprises the at least one additional polynucleotide. In some embodiments, the at least one additional polynucleotide encodes both a first additional exogenous polypeptide and a second additional exogenous polypeptide.

[0360] In some embodiments, the method of making a population of genetically engineered NK cells, further comprises linking an additional exogenous polypeptide (e.g., a functional effector element disclosed herein) to at least one NK cell of the NK cell population by chemical conjugation or using a sortase enzyme disclosed herein.

[0361] In some embodiments, the cells are expanded in expansion medium containing L-glutamine. In some embodiments the cells are expanded in AIM-V medium. In some embodiments, the clone selected for expansion demonstrates the capacity to specifically recognize and lyse CD70 expressing target cells.

[0362] NK cells may be activated and expanded by any method known in the art (see, e.g., (Shah et al. PLoS One 8(10):e76781, 2013), e.g., the cells may be cultured in suitable basal culture medium (e.g., X-VIVO15, Lympho ONE, NK MACS EL837, and others) supplemented with IL-2 (e.g., 1,000 U/mL) and one or more agents to stimulate growth (e.g., magnetic beads conjugated with anti-NKp46 and anti-CD2, anti-CD137 antibody, 4-1BBL, IL-7, IL-8, IL-12, IL-15, IL-15 receptor antibody, IL-2, and/or IL-21). The NK cells may be co-cultured with artificial antigen-presenting cells or feeder cells (e.g., HMV-II cells, Lu-130 cells, Lu-134-A cells, TCO-2 cells, K562 cells, HFWT cells, EBV-LCL cells, or HUT78 cells, optionally genetically modified to express one or more stimulatory proteins (e.g., IL-21, IL-15, OX40L and/or 4-1BBL). Alternatively, a solid support having on its surface one or more proteins capably of inducing the activation and/or a proliferative response may be used instead of a feeder cell line.

[0363] In some embodiments, the NK cells are expanded in the presence of feeder cells (e.g., APCs). In some embodiments the feeder cells are an immortalized cell line. In some embodiments, the feeder cells are autologous cells. In some embodiments, the feeder cells have been irradiated. For example, the recombinant NK cells may be expanded by stimulation with artificial antigen presenting cells, by stimulation with EBC-LCS cells or with T-cells (e.g., Jurkat cell line, CD4+ T cells). In some embodiments, feeder cells (e.g., aAPCs) are genetically engineered, expressing the desired antigen (e.g., CD70) along with costimulatory molecules, such as 4-1BBL, CD28, mbIL-15 and/or mbIL-21, to select for immune cells (e.g., NK cells) in vitro that are capable of sustained CAR-mediated propagation. This powerful technology allows the manufacture of clinically relevant numbers (up to 10¹⁰) of CAR′ NK cells suitable for human application. As needed, additional stimulation cycles can be undertaken to generate larger numbers of genetically modified NK cells. For example, at least 90% of the propagated NK cells express CAR and can be cryopreserved for infusion. Furthermore, this approach can be harnessed to generate NK cells to diverse tumor types by pairing the specificity of the introduced CAR with expression of the tumor-associated antigen (TAA) recognized by the CAR on the aAPC.

[0364] In some embodiments, the cells are expanded in the presence of feeder cells at least one time, at least two times, at least three times, at least four times or at least five times. In some embodiments, the cells are expanded in the presence of feeder cells two times. In some embodiments, the cells are expanded in the presence of feeder cells every 1 day, 2 days, 3 days, 4 days, 5 days, 6 days, 7 days, 8 days, 9 days, 10 days, 11 days, 12 days, 13 days or 14 days. In some embodiments, the cells are expanded in the presence of feeder cells for about 1 day to about 7 days, about 8 days to about 14 days, about 15 days to about 21 days, about 22 days to about 28 days or about 29 days to about 42 days. In some embodiments, the cells are expanded in the presence of feeder cells for about 10 days to about 14 days.

[0365] In some embodiments, the cells are expanded in the absence of feeder cells from about 1 day to about 7 days, about 8 days to about 14 days, about 15 days to about 21 days, about 22 days to about 28 days or about 29 days to about 42 days. In some embodiments, the cells are expanded in the absence of feeder cells from about 10 days to about 14 days.

[0366] Following genetic modification, the cells may be immediately infused or may be stored. In certain aspects, following genetic modification, the cells may be propagated for days, weeks, or months ex vivo as a bulk population within about 1, 2, 3, 4, 5 days or more following gene transfer into cells. In a further aspect, the transfectants are cloned and a clone demonstrating presence of a single integrated or episomally maintained expression cassette or plasmid, and expression of the chimeric receptor is expanded ex vivo. In some embodiments, the clone is expanded about 10-100 fold, about 100-1000 fold, about 1000-2000 fold, about 2000-3000 fold, about 3000-4000 fold or about 4000-5000 fold in culture. In some embodiments, the clone is expanded at least 1,000-fold in culture.

### IV. Methods of Modified NK-Cell Cryopreservation

[0367] In a further aspect, the genetically modified cells may be cryopreserved. In some embodiments of the present disclosure, the NK cells described herein are modified at a point-of-care site. In some cases, modified NK cells are also referred to as engineered NK cells. In some cases, the point-of-care site is at a hospital or at a facility (e.g., a medical facility) near a subject in need of treatment. The subject undergoes apheresis and peripheral blood mononuclear cells (PBMCs) or a sub population of PBMC can be enriched for example, by elutriation or Ficoll separation. Enriched PBMC or a subpopulation of PBMC can be cryopreserved in any appropriate cryopreservation solution prior to further processing. In one instance, the elutriation process is performed using a buffer solution containing human serum albumin. Immune effector cells, such as NK cells can be isolated by selection methods described herein. In one instance, the selection method for NK cells includes beads specific for CD56 on NK cells. In one case, the beads can be paramagnetic beads. The harvested immune effector cells can be cryopreserved in any appropriate cryopreservation solution prior to modification. The immune effector cells can be thawed up to 24 hours, 36 hours, 48 hours. 72 hours or 96 hours ahead of infusion. The thawed cells can be placed in cell culture buffer, for example in cell culture buffer (e.g., RPMI) supplemented with fetal bovine serum (FBS) or human serum AB or placed in a buffer that includes cytokines such as IL-2 and IL-21, prior to modification. In another aspect, the harvested immune effector cells can be modified immediately without the need for cryopreservation.

[0368] In one aspect, the population of genetically modified CAR cells is cryopreserved prior to infusion into a subject. Genetically modified CAR cells that are thawed following cryopreservation maintain their ability to bind to the target antigen. In some embodiments, at least 10%, at least 15%, at least 20%, at least 25%, at least 30%, at least 35%, at least 40%, at least 45%, at least 50%, at least 55%, at least 60%, at least 65%, at least 70%, at least 75%, at least 80%, at least 85%, at least 90%, at least 95%, at least 96%, at least 97%, at least 98% or at least 99% of the cryopreserved genetically modified CAR cells maintain their ability to bind to the target antigen after thawing.

[0369] In one aspect, the population of genetically modified CAR cells is immediately infused into a subject. In another aspect, the population of genetically modified CAR cells is placed in a cytokine bath prior to infusion into a subject. In a further aspect, the population of genetically modified CAR cells is cultured and/or stimulated for no more than 1, 2, 3, 4, 5, 6, 7, 14, 21, 28, 35 42 days, 49, 56, 63 or 70 days. In an embodiment, a stimulation includes the co-culture of the genetically modified CAR T cells with aAPCs to promote the growth of CAR positive T cells. In another aspect, the population of genetically modified CAR cells is stimulated for not more than: 1× stimulation, 2× stimulation, 3× stimulation, 4× stimulation, 5× stimulation, 5× stimulation, 6× stimulation, 7× stimulation, 8× stimulation, 9× stimulation or 10× stimulation. In some instances, the genetically modified cells are not cultured ex vivo in the presence of aAPCs. In some specific instances, the method of the embodiment further comprises enriching the cell population for CAR-expressing immune effector cells (e.g., NK cells) after the transfection and/or culturing step. The enriching can comprise fluorescence-activated cell sorting (FACS) to sort for CAR-expressing cells. The enriching can comprise use of a resin (e.g., magnetic bead) to sort for CAR-expressing cells. In a further aspect, the sorting for CAR-expressing cells comprises use of a CAR-binding antibody. The enriching can also comprise depletion of CD56+ cells. In yet still a further aspect of the embodiment, the method further comprises cryopreserving a sample of the population of genetically modified CAR cells.

[0370] In some cases, the modified immune effector cells do not undergo a propagation and activation step. In some cases, the modified immune effector cells do not undergo an incubation or culturing step (e.g., ex vivo propagation). In certain cases, the modified immune effector cells are placed in a buffer that includes IL-2 and IL21 prior to infusion. In other instances, the modified immune effector cells are placed or rested in cell culture buffer, for example in cell culture buffer (e.g., RPMI) supplemented with fetal bovine serum (FBS) prior to infusion. Prior to infusion, the modified immune effector cells can be harvested, washed and formulated in saline buffer in preparation for infusion into the subject.

### V. Methods of Gene Delivery and Cell Modification

[0371] One of skill in the art would be well-equipped to construct a vector through standard recombinant techniques (see, for example, Sambrook et al., 2001 (supra) and Ausubel et al., 1996 (supra), both incorporated herein by reference) for the expression of the antigen receptors of the present disclosure. Vectors include but are not limited to, plasmids, cosmids, viruses (bacteriophage, animal viruses, and plant viruses), and artificial chromosomes (e.g., YACs), such as retroviral vectors (e.g., derived from Moloney murine leukemia virus vectors (MoMLV), MSCV, SFFV, MPSV, SNV, etc.), lentiviral vectors (e.g. derived from HIV-1, HIV-2, SIV, BIV, FIV, etc.), adenoviral (Ad) vectors including replication competent, replication deficient and gutless forms thereof, adeno-associated viral (AAV) vectors, simian virus 40 (SV-40) vectors, bovine papilloma virus vectors, Epstein-Barr virus vectors, yeast-based vectors, bovine papilloma virus (BPV)-based vectors, herpes virus vectors, vaccinia virus vectors, Harvey murine sarcoma virus vectors, murine mammary tumor virus vectors, Rous sarcoma virus vectors, parvovirus vectors, polio virus vectors, vesicular stomatitis virus vectors, maraba virus vectors and group B adenovirus enadenotucirev vectors.

### 1. Viral Vectors

[0372] Viral vectors encoding an antigen receptor, a cytokine and/or a functional effector element may be provided in certain aspects of the methods of the present disclosure. In generating recombinant viral vectors, non-essential genes are typically replaced with a gene or coding sequence for a heterologous (or non-native) protein. A viral vector is a kind of expression construct that utilizes viral sequences to introduce nucleic acid and possibly proteins into a cell. The ability of certain viruses to infect cells or enter cells via receptor mediated-endocytosis, and to integrate into host cell genomes and express viral genes stably and efficiently have made them attractive candidates for the transfer of foreign nucleic acids into cells (e.g., mammalian cells). Non-limiting examples of virus vectors that may be used to deliver a nucleic acid of certain aspects of the present disclosure are described below.

[0373] An engineered virus vector may comprise long terminal repeats (LTRs), a cargo nucleotide sequence, or a cargo cassette. A viral vector-related “cargo cassette” as used herein refers to a nucleotide sequence comprising a left LTR at the 5′ end and a right LTR at the 3′ end, and a nucleotide sequence positioned between the left and right LTRs. The nucleotide sequence flanked by the LTRs is a nucleotide sequence intended for integration into acceptor DNA. A “cargo nucleotide sequence” refers to a nucleotide sequence (e.g., a nucleotide sequence intended for integration into acceptor DNA), flanked by an LTR at each end, wherein the LTRs are heterologous to the nucleotide sequence. A cargo cassette can be artificially engineered.

[0374] In some embodiments of the methods of the disclosure, introducing a nucleic acid sequence and/or a genomic editing construct into an immune cell ex vivo, in vivo, in vitro, or in situ comprises a viral vector. In some embodiments, the viral vector is a non-integrating non-chromosomal vector. Exemplary non-integrating non-chromosomal vectors include, but are not limited to, adeno-associated virus (AAV), adenovirus, and herpes viruses. In some embodiments, the viral vector is an integrating chromosomal vector. Integrating chromosomal vectors include, but are not limited to, adeno-associated vectors (AAV), Lentiviruses, and gamma-retroviruses.

[0375] Lentiviral vectors are well known in the art (see, for example, U.S. Pat. Nos. 6,013,516 and 5,994,136).

[0376] A retroviral vector may also be, e.g., a gammaretroviral vector. A gammaretroviral vector may include, e.g., a promoter, a packaging signal (w), a primer binding site (PBS), one or more (e.g., two) long terminal repeats (LTR), and a transgene of interest, e.g., a gene encoding a CAR. A gammaretroviral vector may lack viral structural gens such as gag, pol, and env. Exemplary gammaretroviral vectors include Murine Leukemia Virus (MLV), Spleen-Focus Forming Virus (SFFV), and Myeloproliferative Sarcoma Virus (MPSV), and vectors derived therefrom. Other gammaretroviral vectors are described, e.g., in Maetzig et al. Viruses 3(6):677-713, 2011.

[0377] Recombinant lentiviral vectors are capable of infecting non-dividing cells and can be used for both in vivo and ex vivo gene transfer and expression of nucleic acid sequences. For example, recombinant lentivirus capable of infecting a non-dividing cell—wherein a suitable host cell is transfected with two or more vectors carrying the packaging functions, namely gag, pol and env, as well as rev and tat—is described in U.S. Pat. No. 5,994,136, incorporated herein by reference.

[0378] In some embodiments of the methods of the disclosure, introducing a nucleic acid sequence and/or a genomic editing construct into an immune cell ex vivo, in vivo, in vitro, or in situ comprises a combination of vectors. Exemplary, non-limiting vector combinations include: viral and non-viral vectors, a plurality of non-viral vectors, or a plurality of viral vectors. Exemplary but non-limiting vectors combinations include: a combination of a DNA-derived and an RNA-derived vector, a combination of an RNA and a reverse transcriptase, a combination of a transposon and a transposase, a combination of a non-viral vector and an endonuclease, and a combination of a viral vector and an endonuclease.

[0379] In some embodiments of the methods of the disclosure, genome modification comprising introducing a nucleic acid sequence and/or a genomic editing construct into an immune cell ex vivo, in vivo, in vitro, or in situ stably integrates a nucleic acid sequence, transiently integrates a nucleic acid sequence, produces site-specific integration a nucleic acid sequence, or produces a biased integration of a nucleic acid sequence. In some embodiments, the nucleic acid sequence is a transgene.

[0380] In some embodiments of the methods of the disclosure, genome modification comprising introducing a nucleic acid sequence and/or a genomic editing construct into an immune cell ex vivo, in vivo, in vitro, or in situ stably integrates a nucleic acid sequence. In some embodiments, the stable chromosomal integration can be a random integration, a site-specific integration, or a biased integration. In some embodiments, the site-specific integration can be non-assisted or assisted. In some embodiments, the assisted site-specific integration is co-delivered with a site-directed nuclease. In some embodiments, the site-directed nuclease comprises a transgene with 5′ and 3′ nucleotide sequence extensions that contain a percentage homology to upstream and downstream regions of the site of genomic integration. In some embodiments, the transgene with homologous nucleotide extensions enable genomic integration by homologous recombination, microhomology-mediated end joining, or nonhomologous end-joining. In some embodiments the site-specific integration occurs at a safe harbor site. Genomic safe harbor sites are able to accommodate the integration of new genetic material in a manner that ensures that the newly inserted genetic elements function reliably (for example, are expressed at a therapeutically effective level of expression) and do not cause deleterious alterations to the host genome that cause a risk to the host organism. Potential genomic safe harbors include, but are not limited to, intronic sequences of the human albumin gene, the adeno-associated virus site 1 (AAVS1), a naturally occurring site of integration of AAV virus on chromosome 19, the site of the chemokine (C-C motif) receptor 5 (CCR5) gene and the site of the human ortholog of the mouse Rosa26 locus.

[0381] In some embodiments, the site-specific transgene integration occurs at a site that disrupts expression of a target gene. In some embodiments, disruption of target gene expression occurs by site-specific integration at introns, exons, promoters, genetic elements, enhancers, suppressors, start codons, stop codons, and response elements. In some embodiments, exemplary target genes targeted by site-specific integration include but are not limited to PD1, any immunosuppressive gene, and genes involved in allo-rejection.

[0382] In some embodiments, the site-specific transgene integration occurs at a site that results in enhanced expression of a target gene. In some embodiments, enhancement of target gene expression occurs by site-specific integration at introns, exons, promoters, genetic elements, enhancers, suppressors, start codons, stop codons, and response elements.

[0383] A. Regulatory Elements

[0384] Expression cassettes included in vectors useful in the present disclosure in particular contain (in a 5′-to-3′ direction) a eukaryotic transcriptional promoter operably linked to a protein-coding sequence, splice signals including intervening sequences, and a transcriptional termination/polyadenylation sequence.

[0385] (i) Promoter/Enhancers

[0386] The expression constructs provided herein comprise a promoter to drive expression of the antigen receptor. To bring a coding sequence “under the control” of a promoter, one positions the 5′ end of the transcription initiation site of the transcriptional reading frame “downstream” of (i.e., 3′ of) the chosen promoter. The “upstream” promoter stimulates transcription of the DNA and promotes expression of the encoded RNA.

[0387] The spacing between promoter elements frequently is flexible, so that promoter function is preserved when elements are inverted or moved relative to one another. A promoter may or may not be used in conjunction with an “enhancer,” which refers to a cis-acting regulatory sequence involved in the transcriptional activation of a nucleic acid sequence.

[0388] A promoter may be one naturally associated with a nucleic acid sequence, as may be obtained by isolating the 5′ non-coding sequences located upstream of the coding segment and/or exon. Such a promoter can be referred to as “endogenous.” Similarly, an enhancer may be one naturally associated with a nucleic acid sequence, located either downstream or upstream of that sequence. Alternatively, certain advantages will be gained by positioning the coding nucleic acid segment under the control of a recombinant or heterologous promoter, which refers to a promoter that is not normally associated with a nucleic acid sequence in its natural environment. A recombinant or heterologous enhancer refers also to an enhancer not normally associated with a nucleic acid sequence in its natural environment. Such promoters or enhancers may include promoters or enhancers of other genes, and promoters or enhancers isolated from any other virus, or prokaryotic or eukaryotic cell, and promoters or enhancers not “naturally occurring,” i.e., containing different elements of different transcriptional regulatory regions, and/or mutations that alter expression. For example, promoters that are most commonly used in recombinant DNA construction include the lactamase (penicillinase), lactose and tryptophan (trp-) promoter systems. Furthermore, it is contemplated that the control sequences that direct transcription and/or expression of sequences within non-nuclear organelles such as mitochondria, chloroplasts, and the like, can be employed as well.

[0389] The promoters employed may be constitutive, tissue-specific, inducible, and/or useful under the appropriate conditions to direct high-level expression of the introduced DNA segment, such as is advantageous in the large-scale production of recombinant proteins and/or peptides. The promoter may be heterologous or endogenous.

[0390] Additionally, any promoter/enhancer combination (as per, for example, the Eukaryotic Promoter Data Base EPDB, through world wide web at epd.isb-sib.ch/) could also be used to drive expression. Use of a T3, T7 or SP6 cytoplasmic expression system is another possible embodiment. Non-limiting examples of promoters include early or late viral promoters, such as, SV40 early or late promoters, cytomegalovirus (CMV) immediate early promoters, Rous Sarcoma Virus (RSV) early promoters; eukaryotic cell promoters, such as, e.g., beta actin promoter, GADPH promoter, metallothionein promoter; and concatenated response element promoters, such as cyclic AMP response element promoters (ere), serum response element promoter (sre), phorbol ester promoter (TPA) and response element promoters (tre) near a minimal TATA box. It is also possible to use human growth hormone promoter sequences (e.g., the human growth hormone minimal promoter described at GENBANK, accession no. X05244, nucleotide 283-341) or a mouse mammary tumor promoter (available from the ATCC, Cat. No. ATCC 45007). In certain embodiments, the promoter is EF1, EF1alpha, MND, CMV IE, dectin-1, dectin-2, human CD1 lc, F4/80, SM22, RSV, SV40, Ad MLP, beta-actin, MHC class I or MHC class II promoter, U6 promoter or H1 promoter, however any other promoter that is useful to drive expression of the therapeutic gene is applicable to the practice of the present disclosure.

[0391] (ii) Initiation Signals and Linked Expression

[0392] A specific initiation signal also may be used in the expression constructs provided in the present disclosure for efficient translation of coding sequences. These signals include the ATG initiation codon or adjacent sequences. Exogenous translational control signals, including the ATG initiation codon, may need to be provided. One of ordinary skill in the art would readily be capable of determining this and providing the necessary signals. It is well known that the initiation codon must be “in-frame” with the reading frame of the desired coding sequence to ensure translation of the entire insert. The exogenous translational control signals and initiation codons can be either natural or synthetic. The efficiency of expression may be enhanced by the inclusion of appropriate transcription functional effector elements.

[0393] In certain embodiments, the use of internal ribosome entry sites (IRES) elements are used to create multigene, or polycistronic, messages. IRES elements can be linked to heterologous open reading frames. Multiple open reading frames can be transcribed together, each separated by an IRES, creating polycistronic messages.

[0394] Additionally, certain 2A sequence elements could be used to create linked- or co-expression of genes in the constructs provided in the present disclosure. For example, cleavage sequences could be used to co-express genes by linking open reading frames to form a single cistron. An exemplary cleavage sequence is the F2A (Foot-and-mouth disease virus 2A) or a “2A-like” sequence (e.g., Thosea asigna virus 2A; T2A) or a P2A (e.g., porcine teschovirus-1 2A).

[0395] (iii) Origins of Replication

[0396] In order to propagate a vector in a host cell, it may contain one or more origins of replication sites (often termed “ori”), for example, a nucleic acid sequence corresponding to oriP of EBV as described above or a genetically engineered oriP with a similar or elevated function in programming, which is a specific nucleic acid sequence at which replication is initiated. Alternatively, a replication origin of other extra-chromosomally replicating virus as described above or an autonomously replicating sequence (ARS) can be employed.

[0397] B. Selection and Screenable Markers

[0398] In some embodiments, cells containing a construct of the present disclosure may be identified in vitro or in vivo by including a marker in the expression vector. Such markers would confer an identifiable change to the cell permitting easy identification of cells containing the expression vector. Generally, a selection marker is one that confers a property that allows for selection. A positive selection marker is one in which the presence of the marker allows for its selection, while a negative selection marker is one in which its presence prevents its selection. An example of a positive selection marker is a drug resistance marker (e.g., genes that confer resistance to neomycin, puromycin, hygromycin, DHFR, GPT, zeocin and histidinol). Other types of markers including screenable markers such as GFP are also contemplated. Alternatively, screenable enzymes as negative selection markers such as herpes simplex virus thymidine kinase (tk) or chloramphenicol acetyltransferase (CAT) may be utilized. One of skill in the art would also know how to employ immunologic markers, possibly in conjunction with FACS analysis. The marker used is not believed to be important, so long as it is capable of being expressed simultaneously with the nucleic acid encoding a gene product. Further examples of selection and screenable markers are well known to one of skill in the art.

### 2. Other Methods of Nucleic Acid Delivery

[0399] In addition to viral delivery of the nucleic acids encoding the antigen receptor, the following are additional methods of recombinant gene delivery to a given immune cell (e.g., a NK cell) and are thus considered in the present disclosure. Introduction of a nucleic acid, such as DNA or RNA, into the immune cells of the current disclosure may use any suitable methods for nucleic acid delivery for transformation of a cell, as described herein or as would be known to one of ordinary skill in the art. Such methods include, but are not limited to, direct delivery of DNA such as by ex vivo transfection, by injection, including microinjection); by electroporation; by calcium phosphate precipitation; by using DEAE-dextran followed by polyethylene glycol; by direct sonic loading; by liposome mediated transfection and receptor-mediated transfection; by microprojectile bombardment; by agitation with silicon carbide fibers; by Agrobacterium-mediated transformation; by desiccation/inhibition-mediated DNA uptake, and any combination of such methods. Through the application of techniques such as these, organelle(s), cell(s), tissue(s) or organism(s) may be stably or transiently transformed.

[0400] A. Transposition Based Methods of Modification

[0401] Generally, the gene transfer system can include a transposon or a viral integration system.

[0402] In some embodiments, the gene transfer system comprises a transposon system. DNA transposons can translocate via a non-replicative “cut-and-paste” mechanism. This mechanism requires recognition of the two inverse terminal repeats (ITRs) by a catalytic enzyme, i.e., transposase, which can cleave its target and consequently release the DNA transposon from its donor template. Upon excision, the DNA transposons may subsequently integrate into the acceptor DNA that is cleaved by the same transposase. In some of their natural configurations, DNA transposons are flanked by two ITRs and may contain a gene encoding a transposase that catalyzes transposition.

[0403] Transposon systems offer many advantages for nucleic acid integration, e.g., as compared to viral vectors. For example, transposons can carry larger cargos, which can be advantageous for delivering one or more of the CARs, functional effector elements, and/or cytokines disclosed herein, to an immune cell (e.g., an NK cell). Further, transposons may comprise, for example, CRISPR tools (e.g., along with cargo), and thereby allow multiplex engineering of a cell.

[0404] A transposon system comprises (i) a plasmid backbone with inverse terminal repeats (ITRs) and (ii) a transposase enzyme that recognizes the ITRs. The term “inverse terminal repeats,” “inverted terminal repeats”, or “ITRs”, as used interchangeably herein, refers to short sequence repeats flanking the transposase gene in a natural transposon, or flanking a cargo polynucleotide sequence in an artificially engineered transposon. Two inverted terminal repeats are generally required for the mobilization of the transposon in the presence of a corresponding transposase. Inverted repeats as described herein may contain one or more direct repeat (DR) sequences. These DR sequences usually are embedded in the terminal inverted repeats (ITRs) of the elements. The compositions and methods of the present disclosure comprise, in various embodiments, one or more artificially engineered transposons. An engineered transposon may comprise ITRs, a cargo nucleotide sequence, or a cargo cassette. A transposon-related “cargo cassette” as used herein refers to a nucleotide sequence comprising a left ITR at the 5′ end and a right ITR at the 3′ end, and a nucleotide sequence positioned between the left and right ITRs. The nucleotide sequence flanked by the ITRs is a nucleotide sequence intended for integration into acceptor DNA. The cargo cassette can, in some embodiments, be comprised in a vector, such as plasmid. A “cargo nucleotide sequence” refers to a nucleotide sequence (e.g., a nucleotide sequence intended for integration into acceptor DNA), flanked by an ITR at each end, wherein the ITRs are heterologous to the nucleotide sequence. A cargo cassette can be artificially engineered.

[0405] Transposons and Transposase

[0406] Exemplary transposon systems for use as described in the disclosure include, but are not limited to, piggyBac, hyperactive piggyBac, Sleeping Beauty (SB), hyperactive Sleeping Beauty (SB100×), SB11, SB110, Tn7, TcBuster, hyperactive TcBuster, Frog Prince, IS5, Tn10, Tn903, SPIN, hAT, Hermes, Hobo, AeBuster1, AeBuster2, AeBuster3, BtBuster1, BtBuster2, CfBuster1, CfBuster2, Tol2, mini-Tol2, Tc3, Mos1, MuA, Himar I, Helitron and engineered versions of transposase family enzymes (Zhang et al., PLoS Genet. 5:e1000689, 2009; Wilson et al., J. Microbiol. Methods 71:332-5, 2007; the entire contents of which are incorporated by reference herein). Exemplary transposons also include the transposons described in Arensburger et al. (Genetics 188(1):45-57, 2011; the entire contents of which are incorporated by reference herein), or a SPACE INVADERS (SPIN) transposon (see, e.g., Pace et al., Proc. Natl. Acad. Sci. U.S.A. 105(44):17023-17028, 2008; the entire contents of which are incorporated by reference herein). In some embodiments, the gene transfer system can be delivered to the cell encoded in DNA, encoded in mRNA, as a protein, or as a nucleoprotein complex. Alternatively, the gene transfer system can be integrated into the genome of a host cell using, for example, a retro-transposon, random plasmid integration, recombinase-mediated integration, homologous recombination mediated integration, or non-homologous end joining mediated integration. More examples of transposition systems that can be used with certain embodiments of the compositions and methods provided herein include Staphylococcus aureus Tn552 (Colegio et al., J. Bacteriol. 183:2384-8, 2001; Kirby et al., Mol. Microbiol. 43:173-86, 2002), Tyl (Devine & Boeke, Nucleic Acids Res. 22:3765-72, 1994 and International Publication WO 95/23875), Transposon Tn7 (Craig, Science 271:1512, 1996; Craig, Review in: Curr. Top. Microbiol. Immunol. 204:27-48, 1996), Tn/O and IS10 (Kleckner et al., Curr. Top. Microbiol. Immunol. 204:49-82, 1996), Mariner transposase (Lampe et al., EMBO J. 15:5470-9, 1996), Tel (Plasterk, Curr. Topics Microbiol. Immunol. 204:125-43, 1996), P Element (Gloor, Methods Mol. Biol. 260:97-114, 2004), Tn3 (Ichikawa & Ohtsubo, J. Biol. Chem. 265:18829-32, 1990), bacterial insertion sequences (Ohtsubo & Sekine, Curr. Top. Microbiol. Immunol. 204:1-26, 1996), retroviruses (Brown et al., Proc. Natl. Acad. Sci. U.S.A. 86:2525-9, 1989), and retrotransposon of yeast (Boeke & Corces, Ann. Rev. Microbiol. 43:403-34, 1989). The entire contents of each of the foregoing references are incorporated by reference herein.

[0407] TcBuster

[0408] In some embodiments of the present disclosure, the transposon system is a TcBuster family transposon system. Exemplary TcBuster family transposons of the disclosure include, but are not limited to, the following transposons (wherein the corresponding accession numbers for the appropriate database are shown in parenthesis): (GENBANK database, sequences available on the World Wide Web at ncbi.nlm.nih.gov): Ac-like (AAC46515), Ac (CAA29005), AeBuster1 (ABF20543), AeBuster2 (ABF20544), AmBuster1 (EFB22616), AmBuster2 (EFB25016), AmBuster3 (EFB20710), AmBuster4 (EFB22020), BtBuster1 (ABF22695), BtBuster2 (ABF22700), BtBuster3 (ABF22697), CfBuster1 (ABF22696), CfBuster2 (ABF22701), CfBuster3 (XP_854762), CfBuster4 (XP_545451), CsBuster (ABF20548), Daysleeper (CAB68118), DrBuster1 (ABF20549), DrBuster2 (ABF20550), EcBusterl (XP_001504971), EcBuster3 (XP_001503499), EcBuster4 (XP_001504928), Hermes (AAC37217), hermit (LCU22467), Herves (AAS21248), hobo (A39652), Homer (AAD03082), hopper-we (AAL93203), HsBuster1 (AAF18454), HsBuster2 (ABF22698), HsBuster3 (NP_071373), HsBuster4 (AAS01734), IpTip100 (BAA36225), MamBuster2 (XP_001108973), MamBuster3 (XP_001084430), MamBuster3 (XP_001084430), MamBuster4 (XP_001101327), MmBuster2 (AAF18453), PtBuster2 (ABF22699), PtBuster3 (XP_001142453), PtBuster4 (XP_527300), Restless (CAA93759), RnBuster2 (NP_001102151), SpBuster1 (ABF20546), SpBuster2 (ABF20547), SsBuster4 (XP_001929194), Tam3 (CAA38906), TcBuster (ABF20545), Tol2 (BAA87039), tramp (CAA76545), and XtBuster (ABF20551); (ENSEMBL database, sequences available on the World Wide Web at ensembl.org): PtBuster1 (ENSPTRG00000003364): (REPBASE database, sequences available on the World Wide Web at girinst.org): Ac-like2 (hAT-7_DR), Ac-like1 (hAT-6_DR), hAT-5_DR (hAT-5_DR), MlBuster1 (hAT-4_ML), Myotis-hAT1 (Myotis-hAT1), SPIN_Et (SPIN_Et), SPIN_Ml (SPIN_Ml), and SPIN-Og (SPIN-Og), (TEFam database, sequences available on the World Wide Web at tefam.biochem.vt.edu): AeHermes1 (TF0013337), AeBuster3 (TF001186), AeBuster4 (TF001187), AeBuster5 (TF001188), AeBuster7 (TF001336), AeHermes2 (TF0013338), AeTip100-2 (TF000910), Cx-Kink2 (TF001637), Cx-Kink3 (TF001638), Cx-Kink4 (TF001639), Cx-Kink5 (TF001640), Cx-Kink7 (TF001636), and Cx-Kink8 (TF001635).

[0409] Compositions and methods of the disclosure may comprise a TcBuster transposase and/or a TcBuster hyperactive transposase. In some embodiments, compositions and methods of the disclosure comprise a TcBuster transposase, a TcBuster transposon, or a TcBuster transposase and TcBuster transposon. In some embodiments, compositions and methods of the disclosure comprise a hyperactive TcBuster transposase, a TcBuster transposon, or a hyperactive TcBuster transposase and TcBuster transposon. In some embodiments, a hyperactive TcBuster transposase demonstrates an increased excision and/or increased insertion frequency when compared to an excision and/or insertion frequency of a wild type TcBuster transposase.

[0410] In some embodiments, a hyperactive TcBuster transposase demonstrates an increased transposition frequency when compared to a transposition frequency of a wild type TcBuster transposase. In some embodiments, a TcBuster transposase may comprise any of the mutations disclosed in WO 2019/246486, which is incorporated herein by reference in its entirety.

[0411] In some embodiments of the compositions and methods of the disclosure, a wild type TcBuster transposase comprises or consists of the amino acid sequence of GENBANK Accession No. ABF20545 and SEQ ID NO: 681.

[0412] In some embodiments of the compositions and methods of the disclosure, a TcBuster transposase comprises or consists of an amino acid sequence having at least 20%, 25%, 30%, 35%, 40%, 45%, 50%, 55%, 60%, 65%, 70%, 75%, 80%, 85%, 90%, 91%, 92%, 93%, 94%, 95%, 96%, 97%, 98%, or 99% identity, or any percentage identity in between the foregoing values, or 100% identity, to a wild type TcBuster transposase comprising or consisting of the amino acid sequence of GENBANK Accession No. ABF20545 (SEQ ID NO: 681).

[0413] In some embodiments of the compositions and methods of the disclosure, a wild type TcBuster transposase is encoded by a nucleic acid sequence comprising or consisting of the nucleic acid sequence of SEQ ID NO: 682.

[0414] In some embodiments of the compositions and methods of the disclosure, a TcBuster Transposase is encoded by a nucleic acid sequence comprising or consisting of a sequence having at least 20%, 25%, 30%, 35%, 40%, 45%, 50%, 55%, 60%, 65%, 70%, 75%, 80%, 85%, 90%, 91%, 92%, 93%, 94%, 95%, 96%, 97%, 98%, 99% identity, or any percentage identity in between the foregoing values, or 100% identity, to a wild type TcBuster transposase encoded by a nucleic acid sequence comprising or consisting of GENBANK Accession No. DQ481197 and SEQ ID NO: 682.

[0415] In some embodiments, a recombinant cell, e.g., NK cell produced by transposition-based methods may comprise sequences flanking the nucleotide sequence incorporated into the cell's genome by transposition. Illustrative examples of such flanking sequences (also known as excision footprints) are provided in Woodard et al., (2012) PLoS ONE 7(11): e42666.

[0416] Mutant TcBuster Transposase

[0417] In some embodiments of the disclosure, the transposase is a mutant TcBuster transposase. Typically, a wild-type TcBuster transposase can be regarded as comprising, from N terminus to C terminus, a ZnF-BED domain (amino acids 76-98), a DNA Binding and Oligomerization domain (amino acids 112-213), a first Catalytic domain (amino acids 213-312), an Insertion domain (amino acids 312-543), and a second Catalytic domain (amino acids 583-620), as well as at least four inter-domain regions in between these annotated domains. Unless indicated otherwise, numerical references to amino acids of a TcBuster transposase, as used herein, are all in accordance to SEQ ID NO: 681. A mutant TcBuster transposase of the disclosure comprises one or more amino acid substitutions in any one of these domains, or any combination thereof. In some embodiments, a mutant TcBuster transposase comprises one or more amino acid substitutions in a ZnF-BED domain, a DNA Binding and Oligomerization domain, a first Catalytic domain, an insertion domain, or a combination thereof. In some embodiments, a mutant TcBuster transposase comprises one or more amino acid substitutions in at least one of the two catalytic domains.

[0418] In some embodiments, a mutant TcBuster transposase comprises one or more amino acid substitutions in comparison to a wild-type TcBuster transposase (SEQ ID NO: 681). In some embodiments, the mutant TcBuster transposase comprises an amino acid sequence having at least 70% sequence identity to the full-length sequence of a wild-type TcBuster transposase (SEQ ID NO: 681). In some embodiments, the mutant TcBuster transposase comprises an amino acid sequence having at least 50%, at least 60%, at least 70%, at least 80%, at least 85%, at least 90%, at least 91%, at least 92%, at least 93%, at least 94%, at least 95%, at least 96%, at least 97%, at least 98%, or at least 99% sequence identity to full length sequence of a wild-type TcBuster transposase (SEQ ID NO: 681). In some embodiments, the mutant TcBuster transposase comprises an amino acid sequence having at least 98%, at least 98.5%, at least 99%, at least 99.1%, at least 99.2%, at least 99.3%, at least 99.4%, at least 99.5%, at least 99.6%, at least 99.7%, at least 99.8%, at least 99.9% sequence identity to full length sequence of a wild-type TcBuster transposase (SEQ ID NO: 681). In some embodiments, the mutant TcBuster transposase comprises an amino acid sequence having at least one amino acid that is different from the full-length sequence of a wild-type TcBuster transposase (SEQ ID NO: 681). In some embodiments, the mutant TcBuster transposase comprises an amino acid sequence having at least 2, at least 3, at least 4, at least 5, at least 6, at least 7, at least 8, at least 9, at least 10, at least 11 or more amino acids that are different from the full-length sequence of a wild-type TcBuster transposase (SEQ ID NO: 681). In some embodiments, the mutant TcBuster transposase comprises an amino acid sequence having at least 5, at least 10, at least 20, at least 30, at least 40, at least 50, at least 60, at least 70, at least 80, at least 90, at least 100, at least 200, or at least 250 amino acids that are different from the full-length sequence of a wild-type TcBuster transposase (SEQ ID NO: 681). In some embodiments, the mutant TcBuster transposase comprises an amino acid sequence having at most 3, at most 6, at most 12, at most 25, at most 35, at most 45, at most 55, at most 65, at most 75, at most 85, at most 95, at most 150, or at most 250 amino acids that are different from the full-length sequence of a wild-type TcBuster transposase (SEQ ID NO: 681).

[0419] In some embodiments, a mutant TcBuster transposase of the disclosure comprises one or more (e.g., at least one, at least 2, at least 3, at least 4, at least 5, at least 6, at least 7, at least 8, at least 9, at least 10, at least 11, at least 12, at least 13, at least 14, at least 15, at least 20, at least 30) amino acid substitutions in an amino acid residue selected from Q82, N85, D99, D132, Q151, E153, A154, Y155, E159, T171, K177, D183, D189, E263, E274, 5277, N281, L282, K292, V297, K299, A303, H322, A332, A358, D376, V377, L380, 1398, F400, V431, 5447, N450, 1452, E469, K469, P510, E519, R536, V553, P554, P559, K573, E578, K590, Y595, V596, T598, K599, Q615, T618, D622, E274, V549, R574, E570, G558, P554, D555, G556, L539, E538, E534, 1532, L564, T554, D555, T556, T557, K635, D607, Y595, S591, V583, E578, K573, T544, D545, T546, T547, Y59, G75, L76, S87, H124, D132, D133, C172, D189, T190, Y201, V206, N209, T219, A229, A229, I233, F237, M250, A255, P257, L268, K275, S277, Y284, H285, K292, C318, and H322 (amino acid residue positions in reference to SEQ ID NO: 681). In some embodiments, the mutant TcBuster transposase comprises one or more (e.g., at least one, at least 2, at least 3, at least 4, at least 5, at least 6, at least 7, at least 8, at least 9, at least 10, at least 11, at least 12, at least 13, at least 14, at least 15, at least 20, at least 30, or more) amino acid substitutions selected from Q82E, N85S, D99A, D132A, Q151S, Q151A, E153K, E153R, A154P, Y155H, E159A, T171K, T171R, K177E, D183K, D183R, D189A, E263A, E263K, E263R, E274K, E274R, S277K, N281E, L282K, L282R, K292P, V297K, K299S, A303T, H322E, A332S, A358E, A358K, A358S, D376A, V377T, L380N, I398D, I398S, 1398K, F400L, V431L, S447E, N450K, N450R, I452F, E469K, K469K, P510D, P510N, E519R, R536S, V553S, P554T, P559D, P559S, P559K, K573E, E578L, K590T, Y595L, V596A, T598I, K599A, Q615A, T618K, T618R, D622K, D622R, E274K, V549P, R574K, E570V, G558T, P554T, D555M, G556P, L539F, E538Q, E534A, 1532E, L564C, T554N, D555S, T556D, T557A, K635P, D6071, Y595A, S591I, V583P, E578L, K573R, T544N, D545S, T546D, T547A, Y59F, G75P, L76Q, S87E, H124D, D132K, D133L, C172V, D189N, T190N, T190D, Y201D, V206Q, N209E, T219S, A229S, A229D, I233Q, F237Y, M250F, A255P, P257E, L268T, K275E, 5277G, S277K, Y284I, H285G, K292N, C318I, H322Q, and H322A (amino acid residue positions in reference to SEQ ID NO: 681). In some embodiments, the mutant TcBuster transposase of the disclosure comprises one or more (e.g., at least one, at least 2, at least 3, at least 4, at least 5, at least 6, at least 7, at least 8, at least 9, at least 10, at least 11, at least 12, at least 13, at least 14, at least 15, at least 20, at least 30) amino acid substitutions in an amino acid residue selected from Q82, N85, D99, D132, Q151, E153, A154, Y155, E159, T171, K177, D183, D189, E263, E274, 5277, N281, L282, K292, V297, K299, A303, H322, A332, A358, D376, V377, L380, 1398, F400, V431, S447, N450, I452, E469, K469, P510, E519, R536, V553, P554, P559, K573, E578, K590, Y595, V596, T598, K599, Q615, T618, D622, and E274 (amino acid residue positions in reference to SEQ ID NO: 681). In some embodiments, the mutant TcBuster transposase comprises one or more (e.g., at least one, at least 2, at least 3, at least 4, at least 5, at least 6, at least 7, at least 8, at least 9, at least 10, at least 11, at least 12, at least 13, at least 14, at least 15, at least 20, at least 30, or more) amino acid substitutions selected from Q82E, N85S, D99A, D132A, Q151S, Q151A, E153K, E153R, A154P, Y155H, E159A, T171K, T171R, K177E, D183K, D183R, D189A, E263A, E263K, E263R, E274K, E274R, S277K, N281E, L282K, L282R, K292P, V297K, K299S, A303T, H322E, A332S, A358E, A358K, A358S, D376A, V377T, L380N, I398D, I398S, I398K, F400L, V431L, S447E, N450K, N450R, I452F, E469K, K469K, P510D, P510N, E519R, R536S, V553S, P554T, P559D, P559S, P559K, K573E, E578L, K590T, Y595L, V596A, T598I, K599A, Q615A, T618K, T618R, D622K, D622R, and E274K (amino acid residue positions in reference to SEQ ID NO: 681). In some embodiments, a mutant TcBuster transposase of the disclosure comprises one or more (e.g., at least one, at least 2, at least 3, at least 4, at least 5, at least 6, at least 7, at least 8, at least 9, at least 10, at least 11, at least 12, at least 13, at least 14, at least 15, at least 20, at least 30) amino acid substitutions in an amino acid residue selected from V549, R574, E570, G558, P554, D555, G556, L539, E538, E534, 1532, L564, T554, D555, T556, T557, K635, D607, Y595, S591, V583, E578, K573, T544, D545, T546, T547, Y59, G75, L76, S87, H124, D132, D133, C172, D189, T190, Y201, V206, N209, T219, A229, A229, 1233, F237, M250, A255, P257, L268, K275, S277, Y284, H285, K292, C318, H322, and H322 (amino acid residue positions in reference to SEQ ID NO: 681). In some embodiments, the mutant TcBuster transposase comprises one or more (e.g., at least one, at least 2, at least 3, at least 4, at least 5, at least 6, at least 7, at least 8, at least 9, at least 10, at least 11, at least 12, at least 13, at least 14, at least 15, at least 20, at least 30, or more) amino acid substitutions selected from V549P, R574K, E570V, G558T, P554T, D555M, G556P, L539F, E538Q, E534A, 1532E, L564C, T554N, D555S, T556D, T557A, K635P, D6071, Y595A, 55911, V583P, E578L, K573R, T544N, D545S, T546D, T547A, Y59F, G75P, L76Q, S87E, H124D, D132K, D133L, C172V, D189N, T190N, T190D, Y201D, V206Q, N209E, T219S, A229S, A229D, I233Q, F237Y, M250F, A255P, P257E, L268T, K275E, S277G, S277K, Y284I, H285G, K292N, C318I, H322Q, and H322A (amino acid residue positions in reference to SEQ ID NO: 681).

[0420] In some embodiments, the mutant TcBuster transposase comprises one or more (e.g., at least one, at least 2, at least 3, at least 4, at least 5, at least 6, at least 7, at least 8, at least 9, at least 10, at least 11, at least 12, at least 13, at least 14, at least 15, at least 20, at least 30, or more) amino acid substitutions, or combinations of substitutions in an amino acid residue or combination of amino acid residues selected from V377 and E469; V377, E469, and R536S; A332; V553 and P554; E519; K299; Q615 and T618; 5277; A303; P510; N281; K590; E274; Q258; E247; 5447; N85; V297; A358; 1452; V377, E469, and D189; K573 and E578; 1452, V377, E469, and D189; A358, V377, E469, and D189; K573, E578, V377, E469, and D189; T171; D183; S193; P257; E263; L282; T618; D622; E153, N450; T171; D183; S193; P257; E263; L282; T618; D622; E153; N450; and E247, E274, V297, and A358 (amino acid residue positions in reference to SEQ ID NO: 681).

In some embodiments, the mutant TcBuster transposase comprises one or more (e.g., at least one, at least 2, at least 3, at least 4, at least 5, at least 6, at least 7, at least 8, at least 9, at least 10, at least 11, at least 12, at least 13, at least 14, at least 15, at least 20, at least 30, or more) amino acid substitutions, or combinations of substitutions selected from V377T/E469K; V377T/E469K/R536S; A332S; V553S/P554T; E519R; K299S; Q615A/T618K; S277K; A303T; P510D; P510N; N281S; N281E; K590T; E274K; Q258T; E247K; S447E; N85S; V297K; A358K; I452F; V377T/E469K/D189A; K573E/E578L; 1452F/V377T/E469K/D189A; A358K/V377T/E469K/D189A; K573E/E578L/V377T/E469K/D189A; T171R; D183R; S193R; P257K; E263R; L282K; T618K; D622R; E153K; N450K; T171K; D183K; S193K; P257R; E263K; L282R; T618R; D622K; E153R; N450R; and E247K/E274K/V297K/A358K (amino acid residue positions in reference to SEQ ID NO: 681). In some embodiments, the mutant TcBuster transposase comprises a substitution of an aspartic acid at position 189 with an alanine (D189A); a valine at position 377 with a threonine (V377T); and a glutamic acid at position 469 with a lysine (E469K).

[0421] In some embodiments, the mutant TcBuster transposase comprises one or more amino (e.g., at least one, at least 2, at least 3, at least 4, at least 5, at least 6, at least 7, at least 8, at least 9, at least 10, at least 11, at least 12, at least 13, at least 14, at least 15, at least 20, at least 30, or more) acid substitutions, or combinations of substitutions in an amino acid residue or combination of amino acid residues selected from V377 and E469; V377, E469, and R536S; A332; V553 and P554; E519; K299; Q615 and T618; S277; A303; P510; N281; K590; E274; Q258; E247; S447; N85; V297; A358; I452; V377, E469, and D189; and K573 and E578 (amino acid residue positions in reference to SEQ ID NO: 681). In some embodiments, the mutant TcBuster transposase comprises one or more (e.g., at least one, at least 2, at least 3, at least 4, at least 5, at least 6, at least 7, at least 8, at least 9, at least 10, at least 11, at least 12, at least 13, at least 14, at least 15, at least 20, at least 30, or more) amino acid substitutions, or combinations of substitutions selected from V377T/E469K; V377T/E469K/R536S; A332S; V553S/P554T; E519R; K299S; Q615A/T618K; S277K; A303T; P510D; P510N; N281S; N281E; K590T; E274K; Q258T; E247K; S447E; N85S; V297K; A358K; I452F; V377T/E469K/D189A; and K573E/E578L (amino acid residue positions in reference to SEQ ID NO: 681).

[0422] In some embodiments, the mutant TcBuster transposase is a hyperactive mutant TcBuster transposase. A “hyperactive” mutant TcBuster transposase, as used herein, can refer to any mutant TcBuster transposase that has increased transposition efficiency as compared to a wild-type TcBuster transposase having amino acid sequence SEQ ID NO: 681. In non-limiting examples, when compared to a wild-type TcBuster transposase, a hyperactive mutant TcBuster transposase may have (i) better transposition efficiency when the temperature is higher than normal cell culture temperature; (ii) better transposition efficiency in a relative acidic or basic aqueous medium; and/or (iii) better transposition efficiency when a particular type of transfection technique (e.g., electroporation) is performed. Hyperactive mutant TcBuster transposase may be generated by systemically mutating amino acids of TcBuster transposase to increase a net charge of the amino acid sequence. In some embodiments, this method comprises performing systematic alanine scanning to mutate aspartic acid (D) or glutamic acid (E), which are negatively charged at a neutral pH, to alanine residues. In some embodiments, this method comprises performing systematic mutation to lysine (K) or arginine (R) residues, which are positively charged at a neutral pH.

[0423] Without wishing to be bound by theory, an increase in a net charge of the amino acid sequence at a neutral pH may increase the transposition efficiency of the TcBuster transposase. Particularly, when the net charge is increased in proximity to a catalytic domain of the transposase, the transposition efficiency is expected to increase. It can be contemplated that positively charged amino acids can form points of contact with a DNA target and allow the catalytic domains to act on the DNA target. It may also be contemplated that loss of these positively charged amino acids can decrease either excision or integration activity in transposases. FIG. 5 depicts the wild type TcBuster transposase amino acid sequence, highlighting amino acids that may be points of contact with DNA. An exemplary method of the present disclosure comprises mutating amino acids of the TcBuster transposase that are predicted to be in close proximity to, or to make direct contact with, the DNA. These amino acids can be substituted with amino acids identified as being conserved in other member(s) of the hAT family (e.g., other members of the Buster and/or Ac subfamilies). The amino acids predicted to be in close proximity to, or to make direct contact with, the DNA can be identified, for example, by reference to a crystal structure, predicted structures, mutational analysis, functional analysis, alignment with other members of the hAT family, or any other suitable method.

[0424] In some embodiments, a mutant TcBuster transposase comprises one or more amino acid substitutions that increase a net charge at a neutral pH in comparison to SEQ ID NO: 681. In some embodiments, a mutant TcBuster transposase comprising one or more amino acid substitutions that increase a net charge at a neutral pH in comparison to SEQ ID NO: 681 can be hyperactive. In some embodiments, the mutant TcBuster transposase comprises one or more substitutions to a positively charged amino acid, such as, but not limited to, lysine (K) or arginine (R). In some embodiments, the mutant TcBuster transposase comprises one or more substitutions of a negatively charged amino acid, such as, but not limited to, aspartic acid (D) or glutamic acid (E), with a neutral amino acid, or a positively charged amino acid.

[0425] A non-limiting example of a mutant TcBuster useful in the compositions and methods of the disclosure is a mutant TcBuster transposase that comprises one or more amino acid substitutions that increase a net charge at a neutral pH within or in proximity to a catalytic domain in comparison to SEQ ID NO: 681. The catalytic domain can be the first catalytic domain or the second catalytic domain. The catalytic domain can also include both catalytic domains of the transposase.

[0426] Without wishing to be bound by theory, TcBuster transposase, like other members of the hAT transposase family, comprises a DDE motif, which may be the active site that catalyzes the movement of the transposon. It is contemplated that D223, D289, and E589 make up the active site, which is a triad of acidic residues. The DDE motif may coordinate divalent metal ions and can be important in the catalytic reaction. In some embodiments, a mutant TcBuster transposase comprises one or more amino acid substitutions that increase a net charge at a neutral pH in comparison to SEQ ID NO: 681, and the one or more amino acids are located in proximity to D223, D289, or E589, when numbered in accordance to SEQ ID NO: 681. In some embodiments, a mutant TcBuster transposase as provided herein does not comprise any disruption of the catalytic triad, i.e., D223, D289, or E589. In some embodiments, the mutant TcBuster transposase does not comprise any amino acid substitution at D223, D289, or E589. In some embodiments, the mutant TcBuster transposase may comprise an amino acid substitution at D223, D289, or E589, but such substitution does not disrupt the catalytic activity contributed by the catalytic triad. In some embodiments, the term “proximity” can refer to a measurement of a linear distance in the primary structure of the transposase. For instance, the distance between D223 and D289 in the primary structure of a wild-type TcBuster transposase is 66 amino acids. In certain embodiments, the proximity can refer to a distance of about 70 to 80 amino acids. In some embodiments, the proximity can refer to a distance of about 80, 75, 70, 60, 50, 40, 30, 20, 10, or 5 amino acids. In some embodiments, the term “proximity” can refer to a measurement of a spatial relationship in the secondary or tertiary structure of the transposase, i.e. when the transposase folds into its three dimensional configurations. In some embodiments, the proximity can refer to a distance of about 1 Å, about 2 Å, about 5 Å, about 8 Å, about 10 Å, about 15 Å, about 20 Å, about 25 Å, about 30 Å, about 35 Å, about 40 Å, about 50 Å, about 60 Å, about 70 Å, about 80 Å, about 90 Å, or about 100 Å. A neutral pH can be a pH value around 7 (e.g., between 6.9 and 7.1, between 6.8 and 7.2, between 6.7 and 7.3, between 6.6 and 7.4, between 6.5 and 7.5, between 6.4 and 7.6, between 6.3 and 7.7, between 6.2-7.8, between 6.1-7.9, between 6.0-8.0, between 5-8, or in a range derived therefrom).

[0427] Non-limiting exemplary mutant TcBuster transposases that comprise one or more (e.g., at least one, at least 2, at least 3, at least 4, at least 5, at least 6, at least 7, at least 8, at least 9, at least 10, at least 11, at least 12, at least 13, at least 14, at least 15, at least 20, at least 30) amino acid substitutions that increase a net charge at a neutral pH in comparison to SEQ ID NO: 681 include TcBuster transposases at an amino acid residue selected from E247, E274, V297, A358, S277, E247, E274, V297, A358, S277, T171, D183, S193, P257, E263, L282, T618, D622, E153, N450, T171, D183, 5193, P257, E263, L282, T618, D622, E153, D132, S277, L359, N417, Y427, S591, and Q615 (amino acid residue positions in reference to SEQ ID NO: 681). In some embodiments, the mutant TcBuster transposase comprises one or more (e.g., at least one, at least 2, at least 3, at least 4, at least 5, at least 6, at least 7, at least 8, at least 9, at least 10, at least 11, at least 12, at least 13, at least 14, at least 15, at least 20, at least 30) amino acid substitutions selected from E247K, E274K, V297K, A358K, S277K, E247R, E274R, V297R, A358R, S277R, T171R, D183R, S193R, P257K, E263R, L282K, T618K, D622R, E153K, N450K, T171K, D183K, S193K, P257R, E263K, L282R, T618R, D622K, E153R, and N450R (amino acid residue positions in reference to SEQ ID NO: 681).

[0428] In some embodiments, a mutant TcBuster transposase comprises one or more amino acid substitutions that increase a net charge at a non-neutral pH in comparison to SEQ ID NO: 681. In some embodiments, the net charge is increased by one or more amino acid substitutions within or in proximity to a catalytic domain at a non-neutral pH. In some embodiments, the net charge is increased by one or more amino acid substitutions in proximity to D223, D289, or E589, at a non-neutral pH. In some embodiments, the non-neutral pH can be a pH value lower than 7, lower than 6.5, lower than 6, lower than 5.5, lower than 5, lower than 4.5, lower than 4, lower than 3.5, lower than 3, lower than 2.5, lower than 2, lower than 1.5, or lower than 1. In other embodiments, the non-neutral pH can also be a pH value higher than 7, higher than 7.5, higher than 8, higher than 8.5, higher than 9, higher than 9.5, or higher than 10.

[0429] In some embodiments, the disclosure provides a method of systemically mutating amino acids in the DNA binding and oligomerization domains of the TcBuster transposase. Without wishing to be bound by theory, mutation in the DNA binding and oligomerization domain may increase the binding affinity to DNA target and promote oligomerization activity of the TcBuster transposase, which consequentially may promote transposition efficiency. More specifically, the method comprises systemically mutating amino acids one by one within or in proximity to the DNA binding and oligomerization domain (e.g., amino acid 112 to 213). The method may also comprise mutating more than one amino acid within or in proximity to the DNA binding and oligomerization domain. The method may also comprise mutating one or more amino acids within or in proximity to the DNA binding and oligomerization domain, together with one or more amino acids outside the DNA binding and oligomerization domain.

[0430] In some embodiments, the method comprises performing rational replacement of selective amino acid residues based on multiple sequence alignments of TcBuster with other hAT family transposases (Ac, Hermes, Hobo, Tag2, Tam3, Hermes, Restless and Tol2) or with other members of Buster subfamily (e.g., AeBuster1, AeBuster2, AeBuster3, BtBuster1, BtBuster2, CfBuster1, and CfBuster2). Without being bound by a certain theory, conservancy of certain amino acids among other hAT family transposases, especially among the active ones, may indicate their importance for the catalytic activity of the transposases. Therefore, replacement of unconserved amino acids in wild-type TcBuster sequence (SEQ ID NO: 681) with conserved amino acids among other hAT family may yield a hyperactive mutant TcBuster transposase. The method may comprise obtaining sequences of TcBuster as well as other hAT family transposases; aligning the sequences and identifying the amino acids in TcBuster transposase with a different conserved counterpart among the other hAT family transposases; and performing site-directed mutagenesis to produce mutant TcBuster transposase harboring the mutation(s).

[0431] In some embodiments, a hyperactive mutant TcBuster transposase comprises one or more amino acid substitutions based on alignment to other members of Buster subfamily or other members of hAT family. In some embodiments, the one or more amino acid substitutions can be substitutions of conserved amino acid for the unconserved amino acid in wild-type TcBuster sequence (SEQ ID NO: 681). Non-limiting examples of mutant TcBuster transposases include TcBuster transposases that comprise one or more (e.g., at least one, at least 2, at least 3, at least 4, at least 5, at least 6, at least 7, at least 8, at least 9, at least 10, at least 11, at least 12, at least 13, at least 14, at least 15, at least 20) amino acid substitutions in an amino acid residue selected from Q151, A154, Q615, V553, Y155, Y201, F202, C203, F400, 1398, V431, Y59, G75, L76, S87, H124, D133, C172, D189, D190, T190, Y201, V206, N209, T219, A229, 1233, F237, M250, A255, P257, L268, K275, 5277, Y284, H285, K292, C318, H322, M343, A354, G365, F389, Y427, S426, C462, C470, A472, N473, K490, S491, N492, E535, R536, E538, E567, F568, R574, R574, R574, K590, V594, M612, A632, Y155, 1421, A632, P559, G526, C512, V356, Y284, and N90 (amino acid residue positions in reference to SEQ ID NO: 681). In some embodiments, the mutant TcBuster transposase comprises one or more (e.g., at least one, at least 2, at least 3, at least 4, at least 5, at least 6, at least 7, at least 8, at least 9, at least 10, at least 11, at least 12, at least 13, at least 14, at least 15, at least 20) amino acid substitution selected from Q151S, Q151 Å, A154P, Q615 Å, V553S, Y155H, Y201 Å, F202D, F202K, C203I, C203V, F400L, I398D, 1398S, I398K, V431L, Y59F, G75P, L76Q, S87E, H124D, D133L, C172V, D189N, T190N, T190D, Y201D, V206Q, N209E, T219S, A229S, A229D, I233Q, F237Y, M250F, A255P, P257E, L268T, K275E, S277G, Y284I, H285G, K292N, C318I, H322Q, H322 Å, M343L, A354S, G365D, F389V, Y427S, S426Q, C462D, C470M, A472P, A472D, N473T, K490I, S491N, N492G, E535 Å, R536Q, E538 Å, E567S, F568Y, R574E, R574I, R574T, K590 Å, V594S, M612L, M612S, A632S, Y155F, I421L, A632Q, P559I, G526V, C512E, V356L, Y284V, and N90S (amino acid residue positions in reference to SEQ ID NO: 681).

[0432] Another method of generating mutant TcBuster transposases comprises systemically mutating acidic amino acids to basic amino acids and identifying a resulting hyperactive mutant transposase. In some embodiments, the mutant TcBuster transposase comprises amino acid substitutions V377T, E469K, and D189 Å. In some embodiments, a mutant TcBuster transposase comprises amino acid substitutions K573E and E578L. In some embodiments, a mutant TcBuster transposase comprises amino acid substitution I452K. In some embodiments, a mutant TcBuster transposase comprises amino acid substitution A358K. In some embodiments, a mutant TcBuster transposase comprises amino acid substitution V297K. In some embodiments, a mutant TcBuster transposase comprises amino acid substitution N85S. In some embodiments, a mutant TcBuster transposase comprises amino acid substitutions N85S, V377T, E469K, and D189 Å. In some embodiments, a mutant TcBuster transposase comprises amino acid substitutions I452F, V377T, E469K, and D189 Å. In some embodiments, a mutant TcBuster transposase comprises amino acid substitutions A358K, V377T, E469K, and D189 Å. In some embodiments, a mutant TcBuster transposase comprises amino acid substitutions V377T, E469K, D189 Å, K573E and E578L.

### Inverted Terminal Repeats (ITRs)

[0433] A transposon generally comprises two ITR nucleotide sequences. A transposon described herein may be engineered to comprise a cargo cassette comprising two ITR sequences. In some embodiments, at least one of the ITRs contains at least one direct repeat. In some embodiments, the transposase is one or more of the TcBuster transposases (e.g., mutant TcBuster transposases) disclosed herein, and the TcBuster transposase recognizes one or more ITRs disclosed in Table 10. In some embodiments, a transposon may contain a cargo cassette comprising the nucleic acid sequences of IRDR-L-Seq1 (SEQ ID NO: 2662) and IRDR-R-Seq1 (SEQ ID NO: 2663). The terms “left” and “right”, as used herein with respect to inverted repeats, can refer to the 5′ and 3′ sides or ends of the cargo cassette on the sense strand of the double strand transposon, respectively. In some embodiments, a left inverted repeat can comprise a nucleic acid sequence at least 50%, 60%, 70%, 80%, 85%, 90%, 95%, 96%, 97%, 98%, 99%, or 100% identical to IRDR-L-Seq1 (SEQ ID NO: 2662). In some embodiments, a right inverted repeat can comprise a nucleic acid sequence at least 50%, 60%, 70%, 80%, 85%, 90%, 95%, 96%, 97%, 98%, 99%, or 100% identical to IRDR-R-Seq1 (SEQ ID NO: 2663). In other embodiments, a right inverted repeat can comprise a sequence at least 50%, 60%, 70%, 80%, 85%, 90%, 95%, 96%, 97%, 98%, 99%, or 100% identical to IRDR-L-Seq1 (SEQ ID NO: 2662). In some embodiments, a left inverted repeat can comprise a sequence at least 50%, 60%, 70%, 80%, 85%, 90%, 95%, 96%, 97%, 98%, 99%, or 100% identical to IRDR-R-Seq1 (SEQ ID NO: 2663).

[0434] In other embodiments, the transposon may comprise a cargo cassette comprising the ITR sequences of IRDR-L-Seq2 (SEQ ID NO: 2664) and IRDR-R-Seq2 (SEQ ID NO: 2665). In some embodiments, a left inverted repeat can comprise a nucleic acid sequence at least 50%, 60%, 70%, 80%, 85%, 90%, 95%, 96%, 97%, 98%, 99%, or 100% identical to IRDR-L-Seq2 (SEQ ID NO: 2664). In some embodiments, a right inverted repeat can comprise a nucleic acid sequence at least 50%, 60%, 70%, 80%, 85%, 90%, 95%, 96%, 97%, 98%, 99%, or 100% identical to IRDR-R-Seq2 (SEQ ID NO: 2665). In other embodiments, a right inverted repeat can comprise a nucleic acid sequence at least 50%, 60%, 70%, 80%, 85%, 90%, 95%, 96%, 97%, 98%, 99%, or 100% identical to IRDR-L-Seq2 (SEQ ID NO: 2664). In some embodiments, a left inverted repeat can comprise a nucleic acid sequence at least 50%, 60%, 70%, 80%, 85%, 90%, 95%, 96%, 97%, 98%, 99%, or 100% identical to IRDR-R-Seq2 (SEQ ID NO: 2665).

[0435] Alternatively, a transposon can comprise a cargo cassette comprising the nucleotide sequences of IRDR-L-Seq3 (SEQ ID NO: 2666) and IRDR-R-Seq3 (SEQ ID NO: 2667). In some embodiments, a left inverted repeat can comprise a nucleic acid sequence at least 50%, 60%, 70%, 80%, 85%, 90%, 95%, 96%, 97%, 98%, 99%, or 100% identical to IRDR-L-Seq3 (SEQ ID NO: 2666). In some embodiments, a right inverted repeat can comprise a nucleic acid sequence at least 50%, 60%, 70%, 80%, 85%, 90%, 95%, 96%, 97%, 98%, 99%, or 100% identical to IRDR-R-Seq3 (SEQ ID NO: 2667). In other embodiments, a right inverted repeat can comprise a nucleic acid sequence at least 50%, 60%, 70%, 80%, 85%, 90%, 95%, 96%, 97%, 98%, 99%, or 100% identical to IRDR-L-Seq3 (SEQ ID NO: 2666). In some embodiments, a left inverted repeat can comprise a nucleic acid sequence at least 50%, 60%, 70%, 80%, 85%, 90%, 95%, 96%, 97%, 98%, 99%, or 100% identical to IRDR-R-Seq3 (SEQ ID NO: 2667).

[0436] A transposon may comprise a cargo cassette comprising two inverted repeats that have different nucleotide sequences than the sequences in Table 10, or a combination of the various sequences known to one skilled in the art. In some embodiments, at least one of the two inverted repeats of a transposon provided herein may contain a nucleic acid sequence at least 80%, 85%, 90%, 95%, 96%, 97%, 98%, 99%, or 100% identical to any one of SEQ ID NOs: 2662, 2663, 2664, 2665, 2666 and 2667. In some embodiments, at least one of inverted repeats of a transposon provided herein may contain a sequence that is at least 80%, 85%, 90%, 95%, 96%, 97%, 98%, or 99% identical to SEQ ID NO: 2662. In some embodiments, at least one of inverted repeats of a transposon provided herein may contain a sequence that is at least 80%, 85%, 90%, 95%, 96%, 97%, 98%, or 99% identical to SEQ ID NO: 2663. In some embodiments, at least one of inverted repeats of a transposon provided herein may contain a sequence that is at least 80%, 85%, 90%, 95%, 96%, 97%, 98%, or 99% identical to SEQ ID NO: 2664. In some embodiments, at least one of inverted repeats of a transposon provided herein may contain a sequence that is at least 80%, 85%, 90%, 95%, 96%, 97%, 98%, or 99% identical to SEQ ID NO: 2665. In some embodiments, at least one of inverted repeats of a transposon provided herein may contain a sequence that is at least 80%, 85%, 90%, 95%, 96%, 97%, 98%, or 99% identical to SEQ ID NO: 2666. In some embodiments, at least one of inverted repeats of a transposon provided herein may contain a sequence that is at least 80%, 85%, 90%, 95%, 96%, 97%, 98%, or 99% identical to SEQ ID NO: 2667. The choice of inverted repeat sequences may vary depending on the expected transposition efficiency, the type of cell to be modified, the transposase to use, and many other factors. In some embodiments, minimally sized transposon vector inverted terminal repeats that conserve genomic space may be used. The ITRs of hAT family transposons diverge greatly with differences in right-hand and left-hand ITRs. In some embodiments, smaller ITRs consisting of just 100-200 nucleotides are as active as the longer native ITRs in hAT transposon vectors. These sequences may be consistently reduced while mediating hAT family transposition. These shorter ITRs can conserve genomic space within hAT transposon vectors.

[0437] The inverted repeats of a transposon provided herein can be about 50 to 2000 nucleotides, about 50 to 1000 nucleotides, about 50 to 800 nucleotides, about 50 to 600 nucleotides, about 50 to 500 nucleotides, about 50 to 400 nucleotides, about 50 to 350 nucleotides, about 50 to 300 nucleotides, about 50 to 250 nucleotides, about 50 to 200 nucleotides, about 50 to 180 nucleotides, about 50 to 160 nucleotides, about 50 to 140 nucleotides, about 50 to 120 nucleotides, about 50 to 110 nucleotides, about 50 to 100 nucleotides, about 50 to 90 nucleotides, about 50 to 80 nucleotides, about 50 to 70 nucleotides, about 50 to 60 nucleotides, about 75 to 750 nucleotides, about 75 to 450 nucleotides, about 75 to 325 nucleotides, about 75 to 250 nucleotides, about 75 to 150 nucleotides, about 75 to 95 nucleotides, about 100 to 500 nucleotides, about 100 to 400 nucleotides, about 100 to 350 nucleotides, about 100 to 300 nucleotides, about 100 to 250 nucleotides, about 100 to 220 nucleotides, or about 100 to 200 nucleotides in length, or any range having upper and lower values derived from any of the foregoing recited values, e.g., from about 50 to 75 nucleotides.

TABLE 10
Exemplary Inverse Terminal Repeats (ITRs)
Recognized by TcBuster Transposase

| ITR | SEQ ID NO |
|---|---|
| IRDR-L-Seq1 | SEQ ID NO: 2662 |
| IRDR-R-Seq1 | SEQ ID NO: 2663 |
| IRDR-L-Seq2 | SEQ ID NO: 2664 |
| IRDR-R-Seq2 | SEQ ID NO: 2665 |
| IRDR-L-Seq3 | SEQ ID NO: 2666 |
| IRDR-R-Seq3 | SEQ ID NO: 2667 |

[0438] Cargo Nucleotide Sequences and Cargo Cassettes

[0439] In some embodiments, the disclosure provides a nucleic acid molecule comprising a cargo nucleotide sequence encoding a CAR described herein and optionally a functional effector element (e.g., a cytokine). In some embodiments, the disclosure provides a nucleic acid molecule comprising a) a first nucleic acid sequence; and b) a second nucleic acid sequence; wherein the first nucleic acid sequence encodes a CAR described herein.

[0440] In some embodiments, the first nucleic acid is located upstream of the second nucleic acid. In some embodiments, the first nucleic acid is located downstream of the second nucleic acid.

[0441] In some embodiments, the first nucleic acid further comprises a first promoter sequence capable of expressing an exogenous sequence in a human cell. In some embodiments, the first promoter sequence is a constitutive promoter. In some embodiments, the first promoter sequence is an inducible promoter. In some embodiments, first promoter sequence is an EF1, EF1alpha, EFS, MND, PGK, CMV IE, dectin-1, dectin-2, CD1 lc, F4/80, SM22, RSV, SV40, Ad MLP, beta-actin, MHC class I, MHC class II, U6 or H1 promoter. In some embodiments, the first promoter sequence is EF1a promoter. In some embodiments, the first promoter sequence is MND promoter.

[0442] The cargo nucleotide sequence may comprise any nucleotide sequence described herein, e.g., a nucleotide sequence intended for integration into acceptor DNA and/or a nucleotide sequence encoding for one or more polypeptides intended to be expressed or produced in an immune cell, e.g., an NK cell. In some embodiments, the cargo nucleotide sequence comprises a nucleotide sequence that encodes for a CAR, a cytokine, and/or a chimeric TGF-β protein described herein. The disclosure further provides a nucleic acid molecule comprising a cargo nucleotide sequence comprising any nucleotide sequence described herein, e.g., a nucleotide sequence intended for integration into acceptor DNA and/or a nucleotide sequence encoding for one or more polypeptides intended to be expressed or produced in an immune cell, e.g., an NK cell (e.g., a nucleic acid sequence encoding for a CAR, a cytokine, and/or a chimeric TGF-β protein described herein).

[0443] In some embodiments, the first nucleic acid sequence further encodes an additional exogenous polypeptide, wherein the sequence encoding the additional exogenous polypeptide is located downstream of the nucleic acid sequence encoding the CAR. In some embodiments, the additional exogenous polypeptide is an IL-15, an IL-15Ra-binding fragment of IL-15, a membrane bound IL-15 (mbIL-15), an IL-15 receptor alpha (IL-15Rα), a fusion of IL-15 and IL-15Ra, a co-stimulatory molecule, a TGFbeta signal converter, a PEBL element and/or a second CAR comprising an antigen recognition domain that specifically binds an antigen other than human CD70. In some embodiments, the additional exogenous polypeptide comprises a TGFbeta signal converter.

[0444] In some embodiments, the cargo nucleotide sequence comprises a nucleotide sequence encoding one or more of (a) a chimeric protein comprising an extracellular domain, a transmembrane domain, and an intracellular domain, wherein the extracellular domain binds to TGF-β, and wherein the intracellular domain comprises an intracellular domain, or a portion thereof, of a stimulatory polypeptide; (b) a chimeric antigen receptor (CAR); and/or (c) a cytokine, e.g., a membrane-associated IL-15/IL-15RA. In some embodiments, the CAR comprises a CD70 antigen binding domain.

[0445] In some embodiments, the cargo nucleotide sequence comprises a nucleotide sequence encoding one or more of (a) a protein comprising a dominant-negative isoform of a TGF-BR2, wherein the dominant-negative isoform of TGF-BR21 competes with a wild-type isoform of a TGF-BR2 for binding TGF-B; (b) a chimeric antigen receptor (CAR); and/or (c) a cytokine, e.g., a membrane-associated IL-15/IL-15RA. In some embodiments, the CAR comprises a CD70 antigen binding domain.

[0446] In some embodiments, the second nucleic acid sequence of a cargo nucleotide sequence encodes an shRNA. In some embodiments, the second nucleic acid sequence encodes an shRNA of SEQ ID NO: 2647, 2648, 2649, 2650, 2651 or 2652. In some embodiments, the second nucleic acid sequence comprises a sequence of SEQ ID NO: 2656, 2657, 2658, 2659, 2660 or 2661.

[0447] In some embodiments, the second nucleic acid further comprises a second promoter sequence capable of expressing an exogenous sequence in a human cell. In some embodiments, the second promoter sequence is a constitutive promoter. In some embodiments, the second promoter sequence is an inducible promoter. In some embodiments, the second promoter sequence is an EF1, EF1alpha, EFS, MND, PGK, CMV IE, dectin-1, dectin-2, human CD11c, F4/80, SM22, RSV, SV40, Ad MLP, beta-actin, MHC class I, MHC class II, U6 or H1 promoter. In some embodiments, the second promoter sequence is a U6 promoter comprising SEQ ID NO: 2653.

[0448] In some embodiments, the disclosure provides a nucleic acid molecule comprising a) a first nucleic acid sequence; and b) a second nucleic acid sequence; wherein the first nucleic acid sequence and the second nucleic acid sequence are located between a first terminal repeat (TR) sequence and a second TR sequence. In some embodiments, the first nucleic acid sequence encodes a CAR described herein. In some embodiments, the first TR sequence is a first inverted terminal repeat (ITR) sequence and the second TR sequence is a second ITR sequence. In some embodiments, the first TR sequence is a first long terminal repeat (LTR) sequence and the second TR sequence is a second LTR sequence.

[0449] In some embodiments, the disclosure provides a viral-vector related nucleic acid molecule, wherein the nucleic acid molecule is engineered to comprise a cargo cassette comprising viral LTR nucleotide sequences flanking a cargo nucleotide sequence.

[0450] In some embodiments, the disclosure provides a transposon-related nucleic acid molecule, wherein the nucleic acid molecule is engineered to comprise a cargo cassette comprising ITR nucleotide sequences flanking a cargo nucleotide sequence. The ITR nucleotide sequences are recognized by a transposase. The transposase and related ITR nucleotide sequences may be from any transposon/transposase system described herein.

[0451] The disclosure further provides a nucleic acid molecule comprising a nucleotide sequence of a first ITR, a nucleotide sequence of a second ITR, and a cargo nucleotide sequence, i.e., a nucleotide sequence encoding for one or more polypeptides intended to be expressed or produced in an immune cell, e.g., an NK cell. In some embodiments, the polypeptide is a CAR, a cytokine, and/or a chimeric TGF-β protein described herein. In some embodiments, the first and second ITRs are any two of the ITR nucleotide sequences provided in Table 10. In some embodiments, the first and second ITRs are IRDR-L-Seq3 and IRDR-R-Seq3, respectively. In some embodiments, the first and second ITRs flank the cargo nucleotide sequence.

[0452] In some embodiments, the cargo cassette, or nucleic acid sequence comprising a first TR nucleotide sequence, a second TR nucleotide sequence, and a cargo nucleotide sequence, is present in an expression vector. The expression vector can be selected from any of the vectors disclosed herein, or any other vectors known to one skilled in the art. In some embodiments, the expression vector is a viral vector. In some embodiments, the viral vector is a lentiviral vector or a gamma-retroviral vector. In some embodiments, the expression vector is a DNA plasmid. In some embodiments the expression vector is a mini-circle vector. In some embodiments, the expression vector is a nanoplasmid vector. In some embodiments, the nanoplasmid vector is selected from the vectors NTC9385C (SEQ ID NO: 2668), NTC9685C (SEQ ID NO: 2669), NTC9385R (SEQ ID NO: 2670), and NTC9685R (SEQ ID NO: 2671), and modifications thereof, as described in International PCT Publication Nos. WO2014/035457 and WO2019/183248, each of which is incorporated in its entirety herein by reference.

[0453] In some embodiments, the nanoplasmid vector comprises a nucleotide sequence having at least 80%, 85%, 90%, 91%, 92%, 93%, 94%, 95%, 96%, 97%, 98%, 99%, or 99.5% sequence identity to the sequence of SEQ ID NO: 2668. In some embodiments, the nanoplasmid vector comprises a nucleotide sequence having at least 80%, 85%, 90%, 91%, 92%, 93%, 94%, 95%, 96%, 97%, 98%, 99%, or 99.5% sequence identity to the sequence of SEQ ID NO: 2669. In some embodiments, the nanoplasmid vector comprises a nucleotide sequence having at least 80%, 85%, 90%, 91%, 92%, 93%, 94%, 95%, 96%, 97%, 98%, 99%, or 99.5% sequence identity to the sequence of SEQ ID NO: 2670. In some embodiments, the nanoplasmid vector comprises a nucleotide sequence having at least 80%, 85%, 90%, 91%, 92%, 93%, 94%, 95%, 96%, 97%, 98%, 99%, or 99.5% sequence identity to the sequence of SEQ ID NO: 2671. Nanoplasmid vectors suitable for use in the present disclosure are described in further detail herein.

[0454] Polynucleotides Encoding the Transposase System

[0455] One aspect of the present disclosure provides a polynucleotide comprising a nucleotide sequence that encodes for a transposase described herein. In some embodiments, the polynucleotide further comprises a nucleotide sequence of a transposon (e.g., an engineered transposon) recognizable by the transposase. In some embodiments, the polynucleotide is comprised in an expression vector. In some embodiments, the expression vector is a DNA plasmid. In some embodiments, the expression vector is a mini-circle vector. In some embodiments, the expression vector is a nanoplasmid.

[0456] The term “mini-circle vector” as used herein can refer to a small circular plasmid derivative that is free of most, if not all, prokaryotic vector parts (e.g., control sequences or non-functional sequences of prokaryotic origin).

[0457] In some embodiments, the mini-circle vector comprises a TcBuster transposon. In some embodiments, the TcBuster transposon can have a size about1.5 kb, about 2 kb, about 2.2 kb, about 2.4 kb, about 2.6 kb, about 2.8 kb, about 3 kb, about 3.2 kb, about 3.4 kb, about 3.6 kb, about 3.8 kb, about 4 kb, about 4.2 kb, about 4.4 kb, about 4.6 kb, about 4.8 kb, about 5 kb, about 5.2 kb, about 5.4 kb, about 5.6 kb, about 5.8 kb, about 6 kb, about 6.5 kb, about 7 kb, about 8 kb, about 9 kb, about 10 kb, about 12 kb, about 25 kb, about 50 kb, or a value between any two of these numbers. In some embodiments, the TcBuster transposon can have a size of at most 2.1 kb, at most 3.1 kb, at most 4.1 kb, at most 4.5 kb, at most 5.1 kb, at most 5.5 kb, at most 6.5 kb, at most 7.5 kb, at most 8.5 kb, at most 9.5 kb, at most 11 kb, at most 13 kb, at most 15 kb, at most 30 kb, or at most 60 kb.

[0458] For genome editing applications with transposons, in some embodiments, it may be desirable to design a transposon for use in a binary system based on two distinct plasmids, whereby the nucleic acid sequence encoding for the transposase is physically separated from the transposon nucleic acid sequence containing the gene of interest flanked by the inverted repeats. Co-delivery of the transposon and transposase-encoding plasmids into the target cells enables transposition via a conventional cut-and-paste mechanism. In some other embodiments, a transposon based system as described herein may comprise a polynucleotide comprising both a nucleic acid sequence encoding a transposase as described herein, and a nucleic acid sequence of a transposon as described herein, i.e., wherein the nucleic acid encoding for the transposase and the transposon nucleic acid are present in the same plasmid.

[0459] One of the limitations of application of plasmid vectors is that transgene expression duration from plasmid vectors is reduced due to promoter inactivation mediated by the bacterial region (i.e., the region encoding the bacterial replication origin and selectable marker) of the vector (Chen et al., 2004. Gene Ther. 11:856-864; Suzuki et al., 2006. J Virol. 80:3293-3300). This results in short duration transgene expression. A strategy to improve transgene expression duration is to remove the bacterial region of the plasmid. For example, minicircle vectors have been developed which do not contain a bacterial region. Removal of the bacterial region in minicircle vectors improved transgene expression duration (Chen et al., 2004, supra). In minicircle vectors, the eukaryotic region polyadenylation signal is covalently linked to the eukaryotic region promoter through a short spacer typically less than 200 bp comprised of the recombined attachment sites. This linkage (spacer region) can tolerate a much longer spacer sequence since while long spacers>1 kb in length resulted in transgene expression silencing in vivo, shorter spacers<500 bp exhibited similar transgene expression patterns to conventional minicircle DNA vectors (Lu et al. Mol. Ther. 20:2111-9, 2012).

[0460] In some embodiments, a vector useful in various aspects of the disclosure is a nanoplasmid vector. The term “nanoplasmid vector” as used herein, refers to a vector combining an RNA selectable marker with a R6K, ColE2 or ColE2 related replication origin. Nanoplasmid vectors can be selected from the nanoplasmid vectors disclosed in any of International PCT Publication No. WO2014/035457, International PCT Publication No. WO2014/077866, and International PCT Publication No. WO2019/183248, each of which is incorporated in its entirety herein by reference.

[0461] In some embodiments, a vector useful in the present disclosure is selected from the vectors NTC8385, NTC8485 and NTC8685. NTC8385, NTC8485 and NTC8685 are antibiotic-free pUC origin vectors, which are precursors to nanoplasmid vectors, and contain a short RNA (RNA-OUT) selectable marker instead of an antibiotic resistance marker such as kanR. The creation and application of these RNA-OUT based antibiotic-free vectors is described in International PCT Publication No. WO2008/153733 and US Publication No. 2010/0184158, each of which is incorporated in its entirety herein by reference.

[0462] In some embodiments, a nanoplasmid vector useful in the present disclosure is selected from the vectors NTC9385C (SEQ ID NO: 2668), NTC9685C (SEQ ID NO: 2669), NTC9385R (SEQ ID NO: 2670), and NTC9685R (SEQ ID NO: 2671), and modifications thereof, as described in International PCT Publication No. WO2014/035457, which is incorporated in its entirety herein by reference. The NTC9385C nanoplasmid vector comprises a ColE2 Replication origin and a spacer region encoded bacterial region (replication and selection) of 281 bp [Nhel site-ssiA-ColE2 Origin (+7)-RNA-OUT-KpnI site]. The NTC9685C nanoplasmid vector comprises a ColE2 Replication origin, a spacer region encoded bacterial region (replication and selection) of 281 bp [Nhel site-ssiA-ColE2 Origin (+7)-RNA-OUT-KpnI site], and a VA1 RNA and SV40 enhancer. The NTC9385R nanoplasmid vector comprises a R6K Replication origin and a spacer region encoded bacterial region (replication and selection) of 466 bp [Nhel site-trpA terminator-R6K Origin-RNA-OUT-KpnI site]. The NTC9685R nanoplasmid vector comprises a R6K Replication origin, a spacer region encoded bacterial region (replication and selection) of 466 bp [Nhel site-trpA terminator-R6K Origin-RNA-OUT-KpnI site], and a VA1 RNA and SV40 enhancer.

[0463] In some embodiments, the nanoplasmid vector comprises a nucleotide sequence having at least 80%, 85%, 90%, 91%, 92%, 93%, 94%, 95%, 96%, 97%, 98%, 99%, or 99.5% sequence identity to a sequence selected from the group consisting of SEQ ID NO: 2668, SEQ ID NO: 2669, SEQ ID NO: 2670, or SEQ ID NO: 2671, as set forth below. In some embodiments, the nanoplasmid vector comprises a nucleotide sequence having at least 80%, 85%, 90%, 91%, 92%, 93%, 94%, 95%, 96%, 97%, 98%, 99%, or 99.5% sequence identity to the sequence of SEQ ID NO: 2668. In some embodiments, the nanoplasmid vector comprises a nucleotide sequence having at least 80%, 85%, 90%, 91%, 92%, 93%, 94%, 95%, 96%, 97%, 98%, 99%, or 99.5% sequence identity to the sequence of SEQ ID NO: 2669. In some embodiments, the nanoplasmid vector comprises a nucleotide sequence having at least 80%, 85%, 90%, 91%, 92%, 93%, 94%, 95%, 96%, 97%, 98%, 99%, or 99.5% sequence identity to the sequence of SEQ ID NO: 2670. In some embodiments, the nanoplasmid vector comprises a nucleotide sequence having at least 80%, 85%, 90%, 91%, 92%, 93%, 94%, 95%, 96%, 97%, 98%, 99%, or 99.5% sequence identity to the sequence of SEQ ID NO: 2671.

[0464] In some embodiments, the nanoplasmid vector comprises modifications that improve the replication of the vector. In some embodiments, the nanoplasmid vector utilizes a Pol III-dependent origin of replication to replicate. In some embodiments, the nanoplasmid vector utilizes a Pol I-dependent origin of replication to replicate. In some embodiments, the nanoplasmid vector comprises an antibiotic selectable marker. In some embodiments, the nanoplasmid vector does not comprise an antibiotic selectable marker. In some embodiments, the nanoplasmid vector comprises an RNA selectable marker.

[0465] B. Other Methods of Modification

[0466] In some embodiments of the methods of the disclosure, a modified immune cell of the disclosure may be produced by introducing a transgene into an immune cell of the disclosure. The introducing step may comprise delivery of a nucleic acid sequence and/or a genomic editing construct via a non-transposition delivery system.

[0467] In some embodiments of the methods of the disclosure, introducing a nucleic acid sequence and/or a genomic editing construct into an immune cell ex vivo, in vivo, in vitro or in situ comprises one or more of topical delivery, adsorption, absorption, electroporation, spin-fection, co-culture, transfection, mechanical delivery, sonic delivery, vibrational delivery, magnetofection or by nanoparticle-mediated delivery. In some embodiments of the methods of the disclosure, introducing a nucleic acid sequence and/or a genomic editing construct into an immune cell ex vivo, in vivo, in vitro or in situ comprises liposomal transfection, calcium phosphate transfection, fugene transfection, and dendrimer-mediated transfection. In some embodiments of the methods of the disclosure, introducing a nucleic acid sequence and/or a genomic editing construct into an immune cell ex vivo, in vivo, in vitro or in situ by mechanical transfection comprises cell squeezing, cell bombardment, or gene gun techniques. In some embodiments of the methods of the disclosure, introducing a nucleic acid sequence and/or a genomic editing construct into an immune cell ex vivo, in vivo, in vitro or in situ by nanoparticle-mediated transfection comprises liposomal delivery, delivery by micelles, and delivery by polymerosomes.

[0468] In some embodiments of the methods of the disclosure, introducing a nucleic acid sequence and/or a genomic editing construct into an immune cell ex vivo, in vivo, in vitro or in situ comprises a non-viral vector. In some embodiments, the non-viral vector comprises a nucleic acid. In some embodiments, the non-viral vector comprises plasmid DNA, linear double-stranded DNA (dsDNA), linear single-stranded DNA (ssDNA), DoggyBone™ DNA, nanoplasmids, minicircle DNA, single-stranded oligodeoxynucleotides (ssODN), DDNA oligonucleotides, single-stranded mRNA (ssRNA), and double-stranded mRNA (dsRNA). In some embodiments, the non-viral vector comprises a transposon of the disclosure.

[0469] In some embodiments of the methods of the disclosure, enzymes may be used to create strand breaks in the host genome to facilitate delivery or integration of the transgene. In some embodiments, enzymes create single-strand breaks. In some embodiments, enzymes create double-strand breaks. In some embodiments, examples of break-inducing enzymes include but are not limited to: transposases, integrases, endonucleases, meganucleases, megaTALs, CRISPR-Cas9, CRISPR-CasX, transcription activator-like effector nucleases (TALEN) or zinc finger nucleases (ZFN). Other editing or break-inducing enzymes may include, without limitation, nucleases such as Cas12a (includes MAD7), Cas12b, Cas12c, Cas13, and many more. In certain instance, the Cas12a nuclease is MAD7.

[0470] In some embodiments, break-inducing enzymes can be delivered to the cell encoded in DNA, encoded in mRNA, as a protein, as a nucleoprotein complex with a guide RNA (gRNA).

[0471] In some embodiments of the methods of the disclosure, the site-specific transgene integration is controlled by a vector-mediated integration site bias. In some embodiments vector-mediated integration site bias is controlled by the chosen lentiviral vector. In some embodiments vector-mediated integration site bias is controlled by the chosen gamma-retroviral vector.

[0472] In some embodiments of the methods of the disclosure, the site-specific transgene integration site is a non-stable chromosomal insertion. In some embodiments, the integrated transgene may become silenced, removed, excised, or further modified.

[0473] In some embodiments of the methods of the disclosure, the genome modification is a non-stable integration of a transgene. In some embodiments, the non-stable integration can be a transient non-chromosomal integration, a semi-stable non chromosomal integration, a semi-persistent non-chromosomal insertion, or a non-stable chromosomal insertion. In some embodiments, the transient non-chromosomal insertion can be epi-chromosomal or cytoplasmic.

[0474] In some embodiments, the transient non-chromosomal insertion of a transgene does not integrate into a chromosome and the modified genetic material is not replicated during cell division.

[0475] In some embodiments of the methods of the disclosure, the genome modification is a semi-stable or persistent non-chromosomal integration of a transgene. In some embodiments, a DNA vector encodes a Scaffold/matrix attachment region (S-MAR) module that binds to nuclear matrix proteins for episomal retention of a non-viral vector allowing for autonomous replication in the nucleus of dividing cells.

[0476] In some embodiments of the methods of the disclosure, the genome modification is a non-stable chromosomal integration of a transgene. In some embodiments, the integrated transgene may become silenced, removed, excised, or further modified.

[0477] In some embodiments of the methods of the disclosure, the modification to the genome by transgene insertion can occur via host cell-directed double-strand breakage repair (homology-directed repair) by homologous recombination (HR), microhomology-mediated end joining (MMEJ), nonhomologous end joining (NHEJ), transposase enzyme-mediated modification, integrase enzyme-mediated modification, endonuclease enzyme-mediated modification, or recombinant enzyme-mediated modification. In some embodiments, the modification to the genome by transgene insertion can occur via CRISPR-Cas9, TALEN or ZFNs.

[0478] C. Nanoparticle Delivery

[0479] The term “gene editing” as used herein refers to the insertion, deletion or replacement of nucleic acids in genomic DNA so as to add, disrupt or modify the function of the product that is encoded by a gene. Various gene editing systems require, at a minimum, the introduction of a cutting enzyme (e.g., a nuclease or recombinase) that cuts genomic DNA to disrupt or activate gene function.

[0480] Further, in gene editing systems that involve inserting new or existing nucleotides/nucleic acids, insertion tools (e.g., DNA template vectors, transposable elements (transposons or retrotransposons) must be delivered to the cell in addition to the cutting enzyme (e.g., a nuclease, recombinase, integrase or transposase). Examples of such insertion tools for a recombinase may include a DNA vector. Other gene editing systems require the delivery of an integrase along with an insertion vector, a transposase along with a transposon/retrotransposon, etc. In some embodiments, an example recombinase that may be used as a cutting enzyme is the CRE recombinase. In various embodiments, example integrases that may be used in insertion tools include viral based enzymes taken from any of a number of viruses including, but not limited to, AAV, gamma retrovirus, and lentivirus. Example transposons/retrotransposons that may be used in insertion tools include, but are not limited to, the piggyBac® transposon, Sleeping Beauty transposon, TcBuster transposon and the L1 retrotransposon.

[0481] In certain embodiments of the methods of the disclosure, non-viral vectors are used for transgene delivery. In certain embodiments, the non-viral vector is a nucleic acid. In certain embodiments, the nucleic acid non-viral vector is plasmid DNA, linear double-stranded DNA (dsDNA), linear single-stranded DNA (ssDNA), DoggyBone™ DNA, nanoplasmids, minicircle DNA, single-stranded oligodeoxynucleotides (ssODN), DDNA oligonucleotides, single-stranded mRNA (ssRNA), and double-stranded mRNA (dsRNA). In certain embodiments, the non-viral vector is a transposon. In certain embodiments, the transposon is TcBuster.

[0482] In certain embodiments of the methods of the disclosure, transgene delivery can occur via viral vector. In certain embodiments, the viral vector is a non-integrating non-chromosomal vectors. Non-integrating non-chromosomal vectors can include adeno-associated virus (AAV), adenovirus, and herpes viruses. In certain embodiments, the viral vector is an integrating chromosomal vectors. Integrating chromosomal vectors can include adeno-associated vectors (AAV), Lentiviruses, and gamma-retroviruses.

[0483] In certain embodiments of the methods of the disclosure, transgene delivery can occur by a combination of vectors. Exemplary but non-limiting vector combinations can include: viral plus non-viral vectors, more than one non-viral vector, or more than one viral vector. Exemplary but non-limiting vectors combinations can include: DNA-derived plus RNA-derived vectors, RNA plus reverse transcriptase, a transposon and a transposase, a non-viral vectors plus an endonuclease, and a viral vector plus an endonuclease.

[0484] In certain embodiments of the methods of the disclosure, the genome modification can be a stable integration of a transgene, a transient integration of a transgene, a site-specific integration of a transgene, or a biased integration of a transgene.

[0485] In certain embodiments of the methods of the disclosure, the genome modification can be a stable chromosomal integration of a transgene. In certain embodiments, the stable chromosomal integration can be a random integration, a site-specific integration, or a biased integration. In certain embodiments, the site-specific integration can be non-assisted or assisted. In certain embodiments, the assisted site-specific integration is co-delivered with a site-directed nuclease. In certain embodiments, the site-directed nuclease comprises a transgene with 5′ and 3′ nucleotide sequence extensions that contain homology to upstream and downstream regions of the site of genomic integration. In certain embodiments, the transgene with homologous nucleotide extensions enable genomic integration by homologous recombination, microhomology-mediated end joining, or nonhomologous end-joining. In certain embodiments the site-specific integration occurs at a safe harbor site. Genomic safe harbor sites are able to accommodate the integration of new genetic material in a manner that ensures that the newly inserted genetic elements function reliably (for example, are expressed at a therapeutically effective level of expression) and do not cause deleterious alterations to the host genome that cause a risk to the host organism. Potential genomic safe harbors include, but are not limited to, intronic sequences of the human albumin gene, the adeno-associated virus site 1 (AAVS1), a naturally occurring site of integration of AAV virus on chromosome 19, the site of the chemokine (C-C motif) receptor 5 (CCR5) gene and the site of the human ortholog of the mouse Rosa26 locus.

[0486] In certain embodiments, the site-specific transgene integration occurs at a site that disrupts expression of a target gene. In certain embodiments, disruption of target gene expression occurs by site-specific integration at introns, exons, promoters, genetic elements, enhancers, suppressors, start codons, stop codons, and response elements. In certain embodiments, exemplary target genes targeted by site-specific integration include but are not limited to CD70 or PD1, any immunosuppressive gene, and genes involved in allo-rejection.

[0487] In certain embodiments, the site-specific transgene integration occurs at a site that results in enhanced expression of a target gene. In certain embodiments, enhancement of target gene expression occurs by site-specific integration at introns, exons, promoters, genetic elements, enhancers, suppressors, start codons, stop codons, and response elements.

[0488] In certain embodiments of the methods of the disclosure, enzymes may be used to create strand breaks in the host genome to facilitate delivery or integration of the transgene. In certain embodiments, enzymes create single-strand breaks. In certain embodiments, enzymes create double-strand breaks. In certain embodiments, examples of break-inducing enzymes include but are not limited to: transposases, integrases, endonucleases, meganucleases, megaTALs, CRISPR-Cas9, CRISPR-CasX, transcription activator-like effector nucleases (TALEN) and zinc finger nucleases (ZFN). In certain embodiments, break-inducing enzymes can be delivered to the cell encoded in DNA, encoded in mRNA, as a protein, as a nucleoprotein complex with a guide RNA (gRNA).

[0489] In certain embodiments of the methods of the disclosure, the site-specific transgene integration is controlled by a vector-mediated integration site bias. In certain embodiments vector-mediated integration site bias is controlled by the chosen lentiviral vector. In certain embodiments vector-mediated integration site bias is controlled by the chosen gamma-retroviral vector.

[0490] In certain embodiments of the methods of the disclosure, the site-specific transgene integration site is a non-stable chromosomal insertion. In certain embodiments, the integrated transgene may become silenced, removed, excised, or further modified. In certain embodiments of the methods of the disclosure, the genome modification is a non-stable integration of a transgene. In certain embodiments, the non-stable integration can be a transient non-chromosomal integration, a semi-stable non chromosomal integration, a semi-persistent non-chromosomal insertion, or a non-stable chromosomal insertion. In certain embodiments, the transient non-chromosomal insertion can be epi-chromosomal or cytoplasmic. In certain embodiments, the transient non-chromosomal insertion of a transgene does not integrate into a chromosome and the modified genetic material is not replicated during cell division.

[0491] In certain embodiments of the methods of the disclosure, the genome modification is a semi-stable or persistent non-chromosomal integration of a transgene. In certain embodiments, a DNA vector encodes a Scaffold/matrix attachment region (S-MAR) module that binds to nuclear matrix proteins for episomal retention of a non-viral vector allowing for autonomous replication in the nucleus of dividing cells.

[0492] In certain embodiments of the methods of the disclosure, the genome modification is a non-stable chromosomal integration of a transgene. In certain embodiments, the integrated transgene may become silenced, removed, excised, or further modified.

[0493] In certain embodiments of the methods of the disclosure, the modification to the genome by transgene insertion can occur via host cell-directed double-strand breakage repair (homology-directed repair) by homologous recombination (HR), microhomology-mediated end joining (MMEJ), nonhomologous end joining (NHEJ), transposase enzyme-mediated modification, integrase enzyme-mediated modification, endonuclease enzyme-mediated modification, or recombinant enzyme-mediated modification. In certain embodiments, the modification to the genome by transgene insertion can occur via CRISPR-Cas9, CRISPR-CasX, TALEN or ZFNs.

[0494] In certain embodiments of the methods of the disclosure, a cell with an in vivo or ex vivo genomic modification can be a germline cell or a somatic cell. In certain embodiments the genetically engineered cell can be a human, non-human, mammalian, rat, mouse, or dog cell. In certain embodiments, the genetically engineered cell can be differentiated, undifferentiated, or immortalized. In certain embodiments, the genetically engineered undifferentiated cell can be a stem cell. In certain embodiments, the genetically engineered cell can be differentiated, undifferentiated, or immortalized. In certain embodiments, the genetically engineered undifferentiated cell can be an induced pluripotent stem cell. In certain embodiments, the genetically engineered cell can be a T cell, a hematopoietic stem cell, a natural killer cell, a macrophage, a dendritic cell, a monocyte, a megakaryocyte, or an osteoclast. In certain embodiments, the genetically engineered cell can be modified while the cell is quiescent, in an activated state, resting, in interphase, in prophase, in metaphase, in anaphase, or in telophase. In certain embodiments, the genetically engineered cell can be fresh, cryopreserved, bulk, sorted into sub-populations, from whole blood, from leukapheresis, or from an immortalized cell line.

[0495] D. Click Chemistry

[0496] Engineered immune cells (e.g., NK cells) described herein can also be produced using coupling reagents to link an exogenous polypeptide (cytokine, targeting moiety etc.) to a cell with the use of click chemistry reactions. Coupling reagents can be used to couple an exogenous polypeptide to a cell, for example, when the exogenous polypeptide is a complex or difficult to express polypeptide, e.g., a polypeptide, e.g., a multimeric polypeptide; large polypeptide; polypeptide derivatized in vitro; an exogenous polypeptide that may have toxicity to, or which is not expressed efficiently in, the NK cells.

[0497] The click chemistry approach was originally conceived as a method to rapidly generate complex substances by joining small subunits together in a modular fashion. (See, e.g., Kolb et al., Angew Chem. Int. Ed. 40:3004-31, 2004; Evans, Aust. J. Chem. 60:384-95, 2007.) Various forms of click chemistry reaction are known in the art, such as the Huisgen 1,3-dipolar cycloaddition copper catalyzed reaction (Tornoe et al., J. Organic Chem. 67:3057-64, 2002), which is often referred to as the “click reaction.” Other alternatives include cycloaddition reactions such as the Diels-Alder, nucleophilic substitution reactions (especially to small strained rings like epoxy and aziridine compounds), carbonyl chemistry formation of urea compounds and reactions involving carbon-carbon double bonds, such as alkynes in thiol-yne reactions. In some embodiments, the click chemistry approach comprises copper catalyzed reaction, as described, e.g., in Rostovstev et al. Angew Chem Int Ed 41:2596, 2002; Tomoe et al. J. Org. Chem. 67:3057, 2002. In other embodiments, the click chemistry approach comprises copper-free click reaction, as described, e.g., by Agard et al. J. Am. Chem. Soc. 126:15046-47, 2004, and Ning et al. Angew Chem. Int. Ed. 49:3065-68, 2010.

[0498] E. Sortases

[0499] In some embodiments, an exogenous polypeptide described herein can be conjugated to the surface of an immune cell (e.g., an NK cell) by various chemical and enzymatic means, including but not limited to chemical conjugation with bifunctional cross-linking agents such as, e.g., an NHS ester-maleimide heterobifunctional crosslinker to connect a primary amine group with a reduced thiol group. These methods also include enzymatic strategies such as, e.g., transpeptidase reaction mediated by a sortase enzyme.

[0500] Sortase transpeptidation, also known as “sortase labeling” or “sortagging,” can be used for bioconjugation of two proteins. Methods and compositions disclosed herein can use or include a sortase from any bacterial species or strain, e.g., a sortase A, a sortase B, a sortase C, a sortase D, a sortase E, a sortase F, or a sortase from a yet unidentified class of sortase enzymes. All gram-positive bacteria examined to date possess at least one major housekeeping sortase (e.g., sortase A) (Barnett et al., J. Bacteriol. 186(17):5865-75, 2004). The methods described herein can be used to evaluate candidate sortases. The amino acid sequences of many sortases and the nucleotide sequences that encode them are known to those of skill in the art and are disclosed in many of the references cited herein. The amino acid sequence of full-length, wild-type S. aureus sortase A comprises the amino acid sequence of SEQ ID NO: 683. Wild-type and mutant sortase molecules can be used to form CAR members, e.g., in situ on immune effector cells that comprise a sortase acceptor motif. An exemplary sortase mutant, which is efficient, and not dependent on non-physiological reaction conditions, is S. aureus Sortase A mutant [P94R/E105K/E108Q/D160N/D165 Å/K190E/K196T]. This mutant lacks the N-terminal 59 amino acid residues of S. aureus sortase A and includes amino acid substitutions that render the enzyme calcium-independent and which make the enzyme faster (amino acid residue numbers herein begin with residue the first residue at the N-terminal end of non-truncated S. aureus sortase A). The primary amino acid sequence of Sortase A mutant [P94R/E105K/E108Q/D160N/D165 Å/K190E/K196T] comprises the amino acid sequence of SEQ ID NO: 684.

[0501] In some embodiments, the sortase recognition motif is LPXTG (SEQ ID NO: 685) or LPXTA (SEQ ID NO: 686) and the sortase acceptor motif is N-terminal donor sequence GGG, resulting in the sortase transfer signature that comprises LPXTGG (SEQ ID NO: 5) after sortase-mediated reaction (Swee et al. Proc. Nat'l. Acad. Sci. USA 110(4):1428-33, 2013). The methods also include combination methods, such as e.g., sortase-mediated conjugation of Click Chemistry handles or “click handles” (an azide and an alkyne) on the antigen and the cell, respectively, followed by a cyclo-addition reaction to chemically bond a polypeptide to a cell, see e.g., Neves et al. Bioconjug. Chem. 24(6): 934-41, 2013. Sortase-mediated modification of proteins is described in WO 2014/183066, WO 2014/183071, and WO 2016/014553 each of which are incorporated by reference in their entireties herein.

[0502] In some embodiments, a protein is modified by the conjugation of a sortase substrate comprising an amino acid, a peptide, a protein, a polynucleotide, a carbohydrate, a tag, a metal atom, a contrast agent, a catalyst, a non-polypeptide polymer, a recognition element, a small molecule, a lipid, a linker, a label, an epitope, an antigen, a therapeutic agent, a toxin, a radioisotope, a particle, or moiety comprising a reactive chemical group, e.g., a click chemistry handle.

[0503] If desired, a catalytic bond-forming polypeptide domain can be expressed on an NK cell extracellularly. Many catalytic bond-forming polypeptides exist, including transpeptidases, sortases, and isopeptidases, including those derived from Spy0128, a protein isolated from Streptococcus pyogenes.

[0504] It has been demonstrated that splitting the autocatalytic isopeptide bond-forming subunit (CnaB2 domain) of Spy0128 results in two distinct polypeptides that retain catalytic activity with specificity for each other. The polypeptides in this system are termed SpyTag and SpyCatcher. Upon mixing, SpyTag and SpyCatcher undergo isopeptide bond formation between Asp117 on SpyTag and Lys31 on SpyCatcher (Zakeri and Howarth, J. Am. Chem. Soc. 132:4526, 2010). The reaction is compatible with the cellular environment and highly specific for protein/peptide conjugation (Zakeri et al., Proc. Natl. Acad. Sci. U.S.A. 109:E690-E697, 2012). SpyTag and SpyCatcher has been shown to direct post-translational topological modification in elastin-like protein. For example, placement of SpyTag at the N-terminus and SpyCatcher at the C-terminus directs formation of circular elastin-like proteins (Zhang et al. J. Am. Chem. Soc. 135(37):13988-97, 2013).

[0505] The components SpyTag and SpyCatcher can be interchanged such that a system in which molecule A is fused to SpyTag and molecule B is fused to SpyCatcher is functionally equivalent to a system in which molecule A is fused to SpyCatcher and molecule B is fused to SpyTag. For the purposes of this document, when SpyTag and SpyCatcher are used, it is to be understood that the complementary molecule could be substituted in its place.

[0506] A catalytic bond-forming polypeptide, such as a SpyTag/SpyCatcher system, can be used to attach the exogenous polypeptide to the surface of an NK cell to make an engineered NK cell. The SpyTag polypeptide sequence can be expressed on the extracellular surface of the NK cell. The SpyTag polypeptide can be, for example, fused to the N terminus of a transmembrane protein, e.g., inserted in-frame at the extracellular terminus or in an extracellular loop of a multi-pass transmembrane protein, fused to a lipid-chain-anchored polypeptide, or fused to a peripheral membrane protein. The nucleic acid sequence encoding the SpyTag fusion can be expressed within an engineered NK cell. An exogenous stimulatory polypeptide can be fused to SpyCatcher. The nucleic acid sequence encoding the SpyCatcher fusion can be expressed and secreted from the same NK cell that expresses the SpyTag fusion. Alternatively, the nucleic acid sequence encoding the SpyCatcher fusion can be produced exogenously, for example in a bacterial, fungal, insect, mammalian, or cell-free production system. Upon reaction of the SpyTag and SpyCatcher polypeptides, a covalent bond will be formed that attaches the exogenous stimulatory polypeptide to the surface of the NK cell to form an engineered NK cell.

[0507] F. Methods of NK Cell Expansion

[0508] Provided herein are methods of making a population of genetically engineered NK cells that include contacting a population of NK cells (e.g., any of the NK cell populations described herein) with a CD70 inhibitor (e.g., any of the exemplary CD70 inhibitors described herein), and expanding the population of NK cells in vitro (e.g., using any of the exemplary techniques described herein). In some embodiments, a CD70 inhibitor is a small interfering RNA (siRNA) that targets CD70 mRNA, a short hairpin RNA (shRNA) that targets CD70 mRNA, a nucleic acid encoding a siRNA that targets CD70 mRNA, a nucleic acid encoding an shRNA that targets CD70 mRNA, or a combination of any of the foregoing. In some embodiments, the CD70 inhibitor comprises an RNA-guided endonuclease and a guide RNA (gRNA) targeting a CD70 gene. In some embodiments, the CD70 inhibitor decreases cell surface level of CD70 polypeptide in at least one NK cell of the population of NK cells. In some embodiments, the CD70 inhibitor comprises a Protein Expression Blocker (PEBL) or a nucleic acid encoding a PEBL, wherein the PEBL comprises a first antigen recognition domain that specifically binds human CD70 and one or more of a localizing domain, an intracellular retention domain and an endoplasmic reticulum (ER) retention domain. In some embodiments, the CD70 inhibitor comprises an antagonistic anti-CD70 antibody or an antigen-binding fragment thereof.

[0509] Following genetic modification the cells may be immediately infused or may be stored. In certain aspects, following genetic modification, the cells may be propagated for days, weeks, or months ex vivo as a bulk population within about 1, 2, 3, 4, 5 days or more following gene transfer into cells. In a further aspect, the transfectants are cloned and a clone demonstrating presence of a single integrated or episomally maintained expression cassette or plasmid, and expression of the chimeric receptor is expanded ex vivo. In some embodiments, the clone is expanded at least 1,000-fold in culture. In certain embodiments, the NK cells (e.g., NK cell clones) are expanded in culture by about 1-1000 fold, such as by about 1-950 fold, 1-900 fold, 1-850 fold, 1-800 fold, 1-750 fold, 1-700 fold, 1-650 fold, 1-600 fold, 1-550 fold, 1-500 fold, 1-450 fold, 1-400 fold, 1-350 fold, 1-300 fold, 1-250 fold, 1-200 fold, 1-150 fold, 1-100 fold, 1-50 fold, 1-10 fold, 10-1000 fold, 10-950 fold, 10-900 fold, 10-800 fold, 10-700 fold, 10-600 fold, 10-500 fold, 10-400 fold, 10-300 fold, 10-200 fold, 10-100 fold, 10-50 fold, 20-1000 fold, 20-900 fold, 20-800 fold, 20-700 fold, 20-600 fold, 20-500 fold, 20-400 fold, 20-300 fold, 20-200 fold, 20-100 fold, 20-50 fold, 30-1000 fold, 30-900 fold, 30-800 fold, 30-700 fold, 30-600 fold, 30-500 fold, 30-400 fold, 30-300 fold, 30-200 fold, 30-100 fold, 30-50 fold, 40-1000 fold, 40-900 fold, 40-800 fold, 40-700 fold, 40-600 fold, 40-500 fold, 40-400 fold, 40-300 fold, 40-200 fold, 40-100 fold, 40-50 fold, 50-1000 fold, 50-900 fold, 50-800 fold, 50-700 fold, 50-600 fold, 50-500 fold, 50-400 fold, 50-300 fold, 50-200 fold, 50-100 fold, 100-1000 fold, 100-900 fold, 100-800 fold, 100-700 fold, 100-600 fold, 100-500 fold, 100-400 fold, 100-300 fold, 100-200 fold, 200-1000 fold, 200-900 fold, 200-800 fold, 200-700 fold, 200-600 fold, 200-500 fold, 200-400 fold, 200-300 fold, 300-1000 fold, 300-900 fold, 300-800 fold, 300-700 fold, 300-600 fold, 300-500 fold, 300-400 fold, 400-1000 fold, 400-900 fold, 400-800 fold, 400-700 fold, 400-600 fold, 400-500 fold, 500-1000 fold, 500-900 fold, 500-800 fold, 500-700 fold, or 500-600 fold. In some embodiments, the cells are expanded in the absence of feeder cells. The clone selected for expansion demonstrates the capacity to specifically recognize and lyse CD70 expressing target cells. The recombinant immune cells may be expanded by stimulation with IL-2, or other cytokines that bind the common gamma-chain (e.g., IL-7, IL-12, IL-15, IL-21, and others). The recombinant NK cells may be expanded by stimulation with artificial antigen presenting cells. In a further aspect, the genetically engineered cells may be cryopreserved.

### 3. Modification of Gene and Polypeptide Expression

[0510] In some embodiments, the NK cells or populations of NK cells of the present disclosure are modified to have altered expression of cellular genes and/or polypeptides, such as CD70, glucocorticoid receptor, TGF beta receptor (e.g., TGFBR1 or TGFBR2), PD1, and/or CISH. In some embodiments an altered expression is a decreased expression of gene and/or polypeptide in at least one NK cell of a population of cells. In some embodiments an altered expression refers to a knockout of the gene. In some embodiments, an altered expression refers to a knockdown of the gene. In some embodiments, an altered expression refers to a reduced expression and/or levels of a polypeptide. In some embodiments, an altered expression refers to an ablation of polypeptide expression. In some embodiments, altered expression refers to sequestration of the polypeptide to internal compartments of the cell and/or a decreased expression or levels of surface polypeptides.

[0511] In some embodiments, the NK cells of the present disclosure are contacted with a CD70 inhibitor and modified to have an altered gene and/or polypeptide expression of CD70. Thus, this disclosure provides methods of making a population of genetically engineered NK cells by (a) providing a population of NK cells, contacting the population of NK cells with a CD70 inhibitor; and (c) expanding the population of NK cells in vitro.

[0512] In some embodiments, the NK cells of the present disclosure are modified to have reduced expression and/or levels of CD70. In some embodiments, the NK cells have been genetically engineered to disrupt expression of endogenous CD70. In some embodiments, an NK cells have been genetically engineered to disrupt expression and/or levels of endogenous CD70 on the cell surface. In some embodiments, disruption of e expression and/or levels of endogenous CD70 on the cell surface is achieved by sequestration of endogenous CD70 to an intracellular compartment(s).

[0513] In some embodiments, an NK cell is contacted with a CD70 inhibitor that disrupts expression of endogenous CD70. This disclosure provides a method of making a population of genetically engineered natural killer (NK) cells, the method comprising (a) providing a population of NK cells; (b) contacting the population of NK cells with a CD70 inhibitor; and (c) expanding the population of NK cells in vitro.

[0514] In some embodiments, (b) contacting the population of NK cells with a CD70 inhibitor may occur prior to (c) expanding the population of NK cells in vitro. In some embodiments, (b) contacting the population of NK cells with a CD70 inhibitor may occur after (c) expanding the population of NK cells in vitro. In some embodiments, (b) contacting the population of NK cells with a CD70 inhibitor may occur concurrently with (c) expanding the population of NK cells in vitro. In some embodiments, (b) contacting the population of NK cells with a CD70 inhibitor may occur prior to, concurrently, and/or after (c) expanding the population of NK cells in vitro.

[0515] In some embodiments, the population of NK cells is contacted with a CD70 inhibitor for at least about 1 day, at least about 2 days, at least about 3 days, at least about 4 days, at least about 5 days, at least about 6 days, or at least about 7 days. In some embodiments, the population of NK cells is contacted with a CD70 inhibitor for at least about 1 hour, at least about 2 hours, at least about 3 hours, at least about 4 hours, at least about 5 hours, at least about 6 hours, at least about 7 hours, at least about 8 hours, at least about 9 hours, at least about 10 hours, at least about 11 hours, at least about 12 hours, at least about 13 hours, at least about 14 hours, at least about 15 hours, at least about 16 hours, at least about 17 hours, at least about 18 hours, at least about 19 hours, at least about 20 hours, at least about 21 hours, at least about 22 hours, at least about 23 hours, or at least about 24 hours.

[0516] In some embodiments, following the contacting with a CD70 inhibitor, the population of NK cells is depleted of any CD70⁺ NK cells. For example, CD70⁺ NK cells may be depleted using methods known in the art including depletion with anti-CD70 antibody-coated magnetic beads.

[0517] Also provided herein is a genetically engineered natural killer (NK) cell modified to have a) a decreased level of total CD70 polypeptide as compared to the level of total CD70 polypeptide in a wild-type NK cell, and/or b) a decreased level of CD70 polypeptide on the cell surface as compared to the level of CD70 on the cell surface in a wild-type NK cell.

[0518] In some embodiments, the genetically engineered NK has a reduced likelihood of fratricide by a NK cell expressing an anti-CD70 CAR compared to the likelihood of fratricide of a NK cell that has not been modified to one or more of: (a) a decreased level of CD70 polypeptide compared to the level of total CD70 polypeptide in a wild-type NK cell; (b) a decreased level of CD70 polypeptide on the cell surface as compared to the level of CD70 on the cell surface in a wild-type NK cell (c) a decreased level of total CD70 polypeptide as compared to the level of total CD70 polypeptide in a wild-type NK cell comprising an anti-CD70 CAR; and (d) a decreased level of CD70 polypeptide on the cell surface as compared to the level of CD70 on the cell surface in a wild-type NK cell comprising an anti-CD70 CAR.

[0519] In some embodiments, the genetically engineered NK cell exhibits greater cell expansion rate than a NK cell that has not been modified to one or more of: (a) a decreased level of total CD70 polypeptide as compared to the level of total CD70 polypeptide in a wild-type NK cell; (b) a decreased level of CD70 polypeptide on the cell surface as compared to the level of CD70 on the cell surface in a wild-type NK cell (c) a decreased level of total CD70 polypeptide as compared to the level of total CD70 polypeptide in a wild-type NK cell comprising an anti-CD70 CAR; and (d) a decreased level of CD70 polypeptide on the cell surface as compared to the level of CD70 on the cell surface in a wild-type NK cell comprising an anti-CD70 CAR.

[0520] In some embodiments, the genetically engineered NK cell comprises a disrupted CD70 gene. In some embodiments, the genetically engineered NK cell comprises a knockout or knockdown of a CD70 gene. In some embodiments, the genetically engineered NK cell comprises at least about 10% less, about 20% less, about 30% less, about 40% less, about 50% less, about 60% less, about 70% less, about 80% less, or about 90% less of CD70 polypeptide on the cell surface and/or total CD70 polypeptide than the wild-type NK cell.

[0521] In some embodiments, the level of CD70 mRNA in the NK cell is reduced and wherein the level of CD70 mRNA is measured by Northern blot, quantitative PCR, or RNA sequencing. In some embodiments, the level of CD70 polypeptide in the NK cell is reduced and wherein the level of CD70 polypeptide is measured by Western blot, ELISA, flow cytometry, or mass spectrometry.

[0522] Further provided herein is a population of NK cells, wherein at least about 30%, about 40%, about 50%, about 60%, about 70%, about 80%, about 90% or about 95% of the cells in the population are the genetically engineered NK cells disclosed herein (e.g., comprising one or more polypeptides and/or nucleic acids described herein). Further provided herein is a pharmaceutical composition comprising any of the genetically engineered NK cells disclosed herein or a population of any of the genetically engineered NK cells disclosed herein, and a pharmaceutically acceptable carrier, diluent or excipient.

[0523] A. CD70 Inhibitors

[0524] Anti-CD70 Antibodies

[0525] In some embodiments, a CD70 inhibitor is an antagonistic anti-CD70 antibody or an antigen-binding fragment thereof. In some embodiments, the antagonistic anti-CD70 antibody binds to CD70 but does not induce signal transduction. In some embodiments, the antagonistic anti-CD70 antibody inhibits the interaction between CD70 and CD27. Methods of determining whether an antibody inhibits the interaction between CD70 and CD27 are known in the art (e.g., ELISA). Exemplary antagonistic anti-CD70 antibodies include but are not limited to cusatuzumab (ARGX-110), MDX-1411, SGN70, 27B3, 57B6, 59D10, 19G10, 9B2, 5B2, 9G2, 5F4, and 9D1. Other exemplary antagonistic anti-CD70 antibodies are described in U.S. Pat. No. 9,765,148 (incorporated herein by reference).

[0526] siRNA and shRNA Targeting CD70 mRNA Expression

[0527] In some embodiments, the CD70 inhibitor comprises a small interfering RNA (siRNA) that targets CD70 mRNA, a short hairpin RNA (shRNA) that targets CD70 mRNA, a nucleic acid encoding a siRNA that targets CD70 mRNA, a nucleic acid encoding an shRNA that targets CD70 mRNA, or a combination of any of the foregoing. In some embodiments, the genetically engineered NK cell comprises an siRNA that targets CD70 mRNA and/or an shRNA that targets CD70 mRNA disclosed herein. In some embodiments, the genetically engineered NK cell comprises a nucleic acid sequence encoding an siRNA that targets CD70 mRNA and/or an shRNA that targets CD70 mRNA disclosed herein.

[0528] In some embodiments, the NK cells of the present disclosure are further modified to have altered expression of other cellular genes and/or polypeptides. For example, cytokine signaling is essential for the normal function of hematopoietic cells. The SOCS family of proteins plays an important role in the negative regulation of cytokine signaling, acting as an intrinsic brake. CIS, a member of the SOCS family of proteins encoded by the CISH gene, has been identified as an important checkpoint molecule in NK cells in mice. In some embodiments, SOCS family proteins encoded by the CISH gene are knocked out in immune cells to improve cytotoxicity, such as in NK cells. Exemplary SOCS family of proteins include, but are not limited to SOCS1, SOCS2, SOCS3 and CISH. This approach may be used alone or in combination with other checkpoint inhibitors to improve anti-tumor activity.

[0529] In some embodiments, the altered gene expression is carried out by effecting a disruption in the gene, such as a knock-out, insertion, missense or frameshift mutation, such as biallelic frameshift mutation, deletion of all or part of the gene, e.g., one or more exon or portion therefore, and/or knock-in. For example, the altered gene expression can be effected by sequence-specific or targeted nucleases, including DNA-binding targeted nucleases such as zinc finger nucleases (ZFN) and transcription activator-like effector nucleases (TALENs), and RNA-guided nucleases such as a CRISPR-associated nuclease (Cas), specifically designed to be targeted to the sequence of the gene or a portion thereof.

[0530] In some embodiments, the alteration of the expression, activity, and/or function of the gene is carried out by disrupting the gene. In some aspects, the gene is modified so that its expression is reduced by at least at or about 20, 30, or 40%, generally at least at or about 50, 60, 70, 80, 90, or 95% as compared to the expression in the absence of the gene modification or in the absence of the components introduced to effect the modification.

[0531] In some embodiments, the alteration is transient or reversible, such that expression of the gene is restored at a later time. In other embodiments, the alteration is not reversible or transient, e.g., is permanent.

[0532] In some embodiments, gene alteration is carried out by induction of one or more double-stranded breaks and/or one or more single-stranded breaks in the gene, typically in a targeted manner. In some embodiments, the double-stranded or single-stranded breaks are made by a nuclease, e.g., an endonuclease, such as a gene-targeted nuclease. In some aspects, the breaks are induced in the coding region of the gene, e.g. in an exon. For example, in some embodiments, the induction occurs near the N-terminal portion of the coding region, e.g. in the first exon, in the second exon, or in a subsequent exon.

[0533] In some aspects, the double-stranded or single-stranded breaks undergo repair via a cellular repair process, such as by non-homologous end-joining (NHEJ) or homology-directed repair (HDR). In some aspects, the repair process is error-prone and results in disruption of the gene, such as a frameshift mutation, e.g., biallelic frameshift mutation, which can result in complete knockout of the gene. For example, in some aspects, the disruption comprises inducing a deletion, mutation, and/or insertion. In some embodiments, the disruption results in the presence of an early stop codon. In some aspects, the presence of an insertion, deletion, translocation, frameshift mutation, and/or a premature stop codon results in disruption of the expression, activity, and/or function of the gene.

[0534] In some embodiments, alteration in gene expression is achieved using antisense techniques, such as by RNA interference (RNAi), short interfering RNA (siRNA), short hairpin (shRNA), tandem shRNA, and/or ribozymes to selectively suppress or repress expression of the gene. siRNA technology is RNAi which employs a double-stranded RNA molecule having a sequence homologous with the nucleotide sequence of mRNA which is transcribed from the gene, and a sequence complementary with the nucleotide sequence. siRNA generally is homologous/complementary with one region of mRNA which is transcribed from the gene, or may be siRNA including a plurality of RNA molecules which are homologous/complementary with different regions. In some aspects, the siRNA is comprised in a polycistronic construct. siRNA and shRNA may be delivered into a cell using any method known in the art, including via transfection, liposomes, chemical solvents, electroporation, viral vectors, pinocytosis, phagocytosis and other forms of spontaneous or induced cellular uptake. For example, transfection reagents that may be used to deliver an siRNA or shRNA of the disclosure to a cell include, but are not limited to, DharmaFECT 1, DharmaFECT 2, DharmaFECT 3, DharmaFECT 4, Lipofectamine 2000, Lipfectamine 3000, or Lipofectamine RNAiMAX.

[0535] Inhibitory molecules, (e.g., PD1 or TGFbeta receptor) can, in some instances, decrease the ability of an immune cell (e.g. an NK cell) to mount an immune effector response. Inhibition of an inhibitory molecule, e.g., by inhibition at the DNA, RNA or protein level, can optimize the immune cell performance. In some embodiments, an inhibitory nucleic acid, e.g., an inhibitory nucleic acid, e.g., a dsRNA, e.g., an siRNA or shRNA, can be used to inhibit expression of an inhibitory molecule in the NK cell. In some embodiments, the inhibitory nucleic acid is a shRNA. In some embodiments, the inhibitory molecule is inhibited within a NK cell. In these instances, a dsRNA molecule that inhibits expression of the inhibitory molecule is linked to the nucleic acid that encodes a component, e.g., all of the components, of the CAR. Examples of inhibitory molecules include but are not limited to SOCS, CISH, PD1 and TGFbeta receptor (TGFBR).

[0536] In some embodiments, a CD70 inhibitor decreases the expression and/or levels of CD70 polypeptide in cells. In some embodiments, expression of the CD70 polypeptide is ablated. Exemplary CD70 inhibitors may include but are not limited to an siRNA, an shRNA, a dsRNA or any combination thereof that targets a CD70 mRNA.

[0537] The gene expression modification techniques above can be used to disrupt the expression of a protein, for example CD70, on NK cells of the disclosure. The cells with a disrupted CD70 gene retain CAR NK cell function even where fratricide may be expected. Cells with CD70 gene expression modification (e.g., in which the CD70 gene has been disrupted using gene editing technology), independent of the CAR insertion, exhibit continued, steady cell growth, relative to unmodified NK cells (or edited NK cells that express CD70). In some embodiments, a disrupted gene is a gene that does not encode functional protein. In some embodiments, a cell that comprises a disrupted gene does not express or have (e.g., at the cell surface) a detectable level (e.g. by antibody, e.g., by flow cytometry) of the protein encoded by the gene. A cell that does not express or have a detectable level of the protein may be referred to as a knockout cell. For example, a cell having a CD70 gene expression modification may be considered a CD70 knockout cell if CD70 protein cannot be detected at the cell surface using an antibody that specifically binds CD70 protein. Exemplary shRNA construct sequences that may be used to disrupt the expression of CD70 on NK cells of the disclosure are provided in Tables 11 and 12.

TABLE 11
Exemplary shRNA Constructs targeting CD70

| | | |
|---|---|---|
| Exemplary | | |
| Construct | | SEQ ID |
| Components | Nucleic Acid Sequences | NO: |

shRNA

| | | |
|---|---|---|
| CD70-shRNA1 | GAAACACTGATGAGACCTT | 2647 |
| CD70-shRNA2 | CCATCGTGATGGCATCTACAT | 2648 |
| CD70-shRNA3 | GTAGCTGAGCTGCAGCTGAAT | 2649 |
| CD70-shRNA4 | TGGCATCTACATGGTACACAT | 2650 |
| CD70-shRNA5 | CAGCTACGTATCCATCGTGAT | 2651 |
| CD70-shRNA6 | ACACACTCTGCACCAACCTCA | 2652 |

shRNA elements

| | | |
|---|---|---|
| U6 Promoter | GAGGGCCTATTTCCCATGATTCCTTCATATTTGCATATACGATACAAGGC | 2653 |
| | TGTTAGAGAGATAATTGGAATTAATTTGACTGTAAACACAAAGATATTAG | |
| | TACAAAATACGTGACGTAGAAAGTAATAATTTCTTGGGTAGTTTGCAGTT | |
| | TTAAAATTATGTTTTAAAATGGACTATCATATGCTTACCGTAACTTGAAA | |
| | GTATTTCGATTTCTTGGCTTTATATATCTTGTGGAAAGGACGAAACACCG | |
| | G | |
| Loop | CTCGAG | 2654 |
| shRNA terminator | TTTTT | 2655 |

TABLE 12
Exemplary shRNA constructs regulated by U6 promoter

| Exemplary | | |
|---|---|---|
| shRNA | | |
| constructs and | | SEQ |
| Domains | Nucleic Acid Sequence | ID NO: |
| U6p-shRNA1 | GAGGGCCTATTTCCCATGATTCCTTCATATTTGCATATACGATACAAGGCTGT | 2656 |
| U6 promoter, | TAGAGAGATAATTGGAATTAATTTGACTGTAAACACAAAGATATTAGTACAAA | |
| shRNA, Loop, | ATACGTGACGTAGAAAGTAATAATTTCTTGGGTAGTTTGCAGTTTTAAAATTA | |
| shRNA, shRNA | TGTTTTAAAATGGACTATCATATGCTTACCGTAACTTGAAAGTATTTCGATTT | |
| terminator | CTTGGCTTTATATATCTTGTGGAAAGGACGAAACACCGGGAAACACTGATGAG | |
| | ACCTTCTCGAG [symbol] TTTTT | |
| U6p-shRNA2 | GAGGGCCTATTTCCCATGATTCCTTCATATTTGCATATACGATACAAGGCTGT | 2657 |
| U6 promoter, | TAGAGAGATAATTGGAATTAATTTGACTGTAAACACAAAGATATTAGTACAAA | |
| shRNA, Loop, | ATACGTGACGTAGAAAGTAATAATTTCTTGGGTAGTTTGCAGTTTTAAAATTA | |
| shRNA, shRNA | TGTTTTAAAATGGACTATCATATGCTTACCGTAACTTGAAAGTATTTCGATTT | |
| terminator | CTTGGCTTTATATATCTTGTGGAAAGGACGAAACACCGGCCATCGTGATGGCA | |
| | TCTACATCTCGAG [symbol] TTTTT | |
| U6p-shRNA3 | GAGGGCCTATTTCCCATGATTCCTTCATATTTGCATATACGATACAAGGCTGT | 2658 |
| U6 promoter, | TAGAGAGATAATTGGAATTAATTTGACTGTAAACACAAAGATATTAGTACAAA | |
| shRNA, Loop, | ATACGTGACGTAGAAAGTAATAATTTCTTGGGTAGTTTGCAGTTTTAAAATTA | |
| shRNA, shRNA | TGTTTTAAAATGGACTATCATATGCTTACCGTAACTTGAAAGTATTTCGATTT | |
| terminator | CTTGGCTTTATATATCTTGTGGAAAGGACGAAACACCGGGTAGCTGAGCTGCA | |
| | GCTGAATCTCGAG [symbol] TTTTT | |
| U6p-shRNA4 | GAGGGCCTATTTCCCATGATTCCTTCATATTTGCATATACGATACAAGGCTGT | 2659 |
| U6 promoter, | TAGAGAGATAATTGGAATTAATTTGACTGTAAACACAAAGATATTAGTACAAA | |
| shRNA, Loop, | ATACGTGACGTAGAAAGTAATAATTTCTTGGGTAGTTTGCAGTTTTAAAATTA | |
| shRNA, shRNA | TGTTTTAAAATGGACTATCATATGCTTACCGTAACTTGAAAGTATTTCGATTT | |
| terminator | CTTGGCTTTATATATCTTGTGGAAAGGACGAAACACCGGTGGCATCTACATGG | |
| | TACACATCTCGAG [symbol] TTTTT | |
| U6p-shRNA5 | GAGGGCCTATTTCCCATGATTCCTTCATATTTGCATATACGATACAAGGCTGT | 2660 |
| U6 promoter, | TAGAGAGATAATTGGAATTAATTTGACTGTAAACACAAAGATATTAGTACAAA | |
| shRNA, Loop, | ATACGTGACGTAGAAAGTAATAATTTCTTGGGTAGTTTGCAGTTTTAAAATTA | |
| shRNA, shRNA | TGTTTTAAAATGGACTATCATATGCTTACCGTAACTTGAAAGTATTTCGATTT | |
| terminator | CTTGGCTTTATATATCTTGTGGAAAGGACGAAACACCGGCAGCTACGTATCCA | |
| | TCGTGATCTCGAG [symbol] TTTTT | |
| U6p-shRNA6 | GAGGGCCTATTTCCCATGATTCCTTCATATTTGCATATACGATACAAGGCTGT | 2661 |
| U6 promoter, | TAGAGAGATAATTGGAATTAATTTGACTGTAAACACAAAGATATTAGTACAAA | |
| shRNA, Loop, | ATACGTGACGTAGAAAGTAATAATTTCTTGGGTAGTTTGCAGTTTTAAAATTA | |
| shRNA, shRNA | TGTTTTAAAATGGACTATCATATGCTTACCGTAACTTGAAAGTATTTCGATTT | |
| terminator | CTTGGCTTTATATATCTTGTGGAAAGGACGAAACACCGGACACACTCTGCACC | |
| | AACCTCACTCGAG [symbol] TTTTTT | |

Exemplary siRNA construct sequences that may be used to disrupt and/or decrease the expression and/or levels of CD70 on NK cells of the disclosure are provided in Table 13.

TABLE 13
Exemplary anti-CD70 siRNA construct sequences

| anti-CD70 | | SEQ |
|---|---|---|
| siRNA constructs | Nucleic Acid Sequence | ID NO: |
| CD70-siRNA1 | CACCAAGGUUGUACCAUUG | 2678 |
| CD70-siRNA2 | GCAUCUACAUGGUACACAU | 2679 |
| CD70-siRNA3 | GCAGCUGAAUCACACAGGA | 2680 |
| CD70-siRNA4 | UGACCACUGCUGCUGAUUA | 2681 |

[0538] Protein Expression Blocker Elements

[0539] In some embodiments, the CD70 inhibitor comprises a Protein Expression Blocker (PEBL) element. In some embodiments, the genetically engineered NK cell comprises a PEBL (e.g., a PEBL that specifically targets CD70) or a nucleic acid encoding a PEBL disclosed herein. In some embodiments, the PEBL comprises a first antigen recognition domain that specifically binds human CD70 and one or more of a localizing domain disclosed herein, an intracellular retention domain disclosed herein and an ER retention domain disclosed herein.

[0540] The present disclosure provides a population of NK cells engineered to express a chimeric antigen receptor (CAR), wherein the CAR comprises a) an antigen recognition domain, b) a hinge domain, c) a transmembrane domain, c) a costimulatory domain and e) an activation domain, and further engineered to express one or more PEBL elements.

[0541] In some embodiments, the population of NK cells expressing a CAR are further engineered to express a polypeptide construct containing a target-binding molecule that binds a target (e.g., protein) that can be removed, neutralized, or blocked from reaching the cell surface. A polypeptide comprising a antigen recognition domain linked to an intracellular localizing domain is referred to herein as “Protein Expression Blocker element” or “PEBL element” (see, e.g., WO 2018/098306 and WO 2016/126213, each of which is incorporated by reference in its entirety). In some embodiments the PEBL comprises an antigen recognition domain that specifically binds human CD70 and or more of a localizing domains, an intracellular retention domain and an endoplasmic reticulum retention domain. The antigen recognition domain is linked to a domain (e.g., a localizing domain or intracellular retention domain or endoplasmic reticulum (ER) retention domain) such that the PEBL element sequesters the target protein to specific cellular compartments, such as the golgi, endoplasmic reticulum, proteasome, or cellular membrane. In some embodiments, the PEBL element does not disrupt DNA, transcription, or translation of the target protein. In some embodiments, the PEBL element sequesters the target protein in the endoplasmic recticulum or golgi and thereby reduces the expression levels (e.g., cell surface expression levels) of the target protein. Exemplary PEBL element structures are described in Kamiya et al. (2018) Blood Adv. 2(5): 517-28.

[0542] In some embodiments, the PEBL element comprises an ER-retention domain 1 comprises an amino acid sequence having at least 90%, 91%, 92%, 93%, 94%, 95%, 96%, 97%, 98%, 99% or 100% identity with the amino acid sequence of SEQ ID NO: 2643.

[0543] In some embodiments, the PEBL element comprises an ER-retention domain 2 comprises an amino acid sequence having at least 90%, 91%, 92%, 93%, 94%, 95%, 96%, 97%, 98%, 99% or 100% identity with the amino acid sequence of SEQ ID NO: 2644.

[0544] In some embodiments, the antigen recognition domain of the PEBL element specifically bind to cell surface proteins or secreted proteins of NK cells. Exemplary target molecules include but are not limited to CD70, CS1 (SLAMF7), CD38, CD96, CTLA4, glucocorticoid receptor, TGF beta receptor (e.g., TGFbetaRII), and PD1.

[0545] In some embodiments, the antigen recognition domain of the PEBL element comprises an antibody or an antigen-binding fragment thereof of the disclosure. In some embodiments, the antigen recognition domain of the PEBL binds to CD70. In some embodiments, the antigen recognition domain comprises a CD27 polypeptide sequence or a portion thereof. In some embodiments, the antigen recognition domain of the PEBL element (e.g., anti-CD70 PEBL) is the same as the antigen recognition domain of a CAR described herein. In some embodiments, the antigen recognition domain of the PEBL element is different than the antigen recognition domain of the CAR expressed by the NK cell or population of NK cells. In some embodiments, the antigen recognition domain of the PEBL element is the same as the antigen recognition domain of the CAR expressed by the NK cell or population of NK cells.

[0546] In embodiments, the antigen recognition domain comprises a single chain antibody fragment (scFv) comprising a light chain variable domain (VL) and heavy chain variable domain (VH) of a target antigen specific monoclonal anti-CD70 antibody. Optionally, the VH and VL are joined by a flexible linker, such as a glycine-serine linker or a Whitlow linker. In embodiments, the scFv is humanized. In some embodiments, the antigen binding moiety may comprise VH and VL that are directionally linked, for example, from N to C terminus, VH-linker-VL or VL-linker-VH.

[0547] In some embodiments, the PEBL element further comprises a signal peptide domain of the disclosure. In some embodiments, the PEBL element further comprises a hinge domain of the disclosure. In some embodiments, the PEBL element comprises a transmembrane domain of the disclosure. In some embodiments, the PEBL element further comprises an activation domain of the disclosure.

[0548] In some embodiments, a CAR and a PEBL element are each encoded by a separate vector. In some embodiments the CAR is an anti-CD70 CAR. In some embodiments, the PEBL element targets CD70.

[0549] In some embodiments a CAR and a cytokine are encoded by the same vector. In some embodiments, the CAR and the PEBL element are separated by a 2A sequence. In some embodiments, the 2A sequence is a T2A sequence. In some embodiments, the 2A sequence is a P2A sequence. In some embodiments, the CAR is an anti-CD70 CAR. In some embodiments, the PEBL element targets CD70.

[0550] Table 14 shows exemplary sequences of PEBL element constructs disclosed herein comprising an anti-CD70 scFv.

TABLE 14
Exemplary Sequences of PEBL element constructs comprising an anti-
CD70 scFv.

| Exemplary PEBL | | |
|---|---|---|
| Elements and | | SEQ ID |
| Domains | Amino Acid Sequence | NO: |
| PEBL-CD70-1 | MALPVTALLLPLALLLHAARPQVQLVQSGAEVKKPGASVKVSCKAS | 2645 |
| CD8α signal peptide, | GYTFTNYGMNWVRQAPGQGLKWMGWINTYTGEPTYADAFKGRVTMT | |
| CD70 scFv (1F6), | RDTSISTAYMELSRLRSDDTAVYYCARDYGDYGMDYWGQGTTVTVS | |
| ER-retention domain 1 | SGGGGSGGGGSGGGGSGDIVMTQSPDSLAVSLGERATINCRASKSV | |
| | STSGYSFMHWYQQKPGQPPKLLIYLASNLESGVPDRFSGSGSGTDF | |
| | TLTISSLQAEDVAVYYCQHSREVPWTFGQGTKVEIKGGGGSGGGGS | |
| | GGGGSGGGGSAEKDEL | |
| PEBL-CD70-2 | MALPVTALLLPLALLLHAARPQVQLVQSGAEVKKPGASVKVSCKAS | 2646 |
| CD8α signal peptide, | GYTFTNYGMNWVRQAPGQGLKWMGWINTYTGEPTYADAFKGRVTMT | |
| CD70 scFv (1F6), | RDTSISTAYMELSRLRSDDTAVYYCARDYGDYGMDYWGQGTTVTVS | |
| CD8α hinge, CD8α | SGGGGSGGGGSGGGGSGDIVMTQSPDSLAVSLGERATINCRASKSV | |
| TM, ER-retention | STSGYSFMHWYQQKPGQPPKLLIYLASNLESGVPDRFSGSGSGTDF | |
| domain 2 | TLTISSLQAEDVAVYYCQHSREVPWTFGQGTKVEIKKPTTTPAPRP | |
| | PTPAPTIASQPLSLRPEACRPAAGGAVHTRGLDFACDIYIWAPLAG | |
| | TCGVLLLSLVITLYKYKSRRSFIEEKKMP | |

[0551] B. ZFPs and ZFNs

[0552] In some embodiments, the CD70 inhibitor includes a DNA-binding protein such as one or more zinc finger protein (ZFP) or transcription activator-like protein (TAL), fused to an effector protein such as an endonuclease. Examples include ZFNs, TALEs, and TALENs.

[0553] Many gene-specific engineered zinc fingers are available commercially. For example, Sangamo Biosciences (Richmond, Calif., USA) has developed a platform (CompoZr) for zinc-finger construction in partnership with Sigma-Aldrich (St. Louis, Mo., USA), allowing investigators to bypass zinc-finger construction and validation altogether, and provides specifically targeted zinc fingers for thousands of proteins (Gaj et al. Trends in Biotechnology: 31(7): 397-405, 2013). In some embodiments, commercially available zinc fingers are used or are custom designed. (See, e.g., Sigma-Aldrich catalog numbers CSTZFND, CSTZFN, CTil-1KT, and PZD0020).

[0554] C. TALs, TALEs and TALENs

[0555] In some embodiments, the CD70 inhibitor comprises a naturally occurring or engineered (non-naturally occurring) transcription activator-like protein (TAL) DNA binding domain, such as in a transcription activator-like protein effector (TALE) protein, See, e.g., U.S. Patent Publication No. 2011/0301073, incorporated by reference in its entirety.

[0556] In some embodiments, the CD70 inhibitor is a DNA binding endonuclease, such as a TALE nuclease (TALEN). In some aspects, the TALEN is a fusion protein comprising a DNA-binding domain derived from a TALE and a nuclease catalytic domain to cleave a nucleic acid target sequence.

[0557] In some embodiments, TALE repeats are assembled to specifically target a gene (e.g., CD70). A library of TALENs targeting 18,740 human protein-coding genes has been constructed (Kim et al. Nat. Struct. Mol. Biol. 20(12):1458-64, 2013). Custom-designed TALE arrays are commercially available through Cellectis Bioresearch (Paris, France), Transposagen Biopharmaceuticals (Lexington, Ky., USA), and Life Technologies (Grand Island, N.Y., USA).

[0558] In some embodiments the TALENs are introduced as trans genes encoded by one or more plasmid vectors. In some aspects, the plasmid vector can contain a selection marker which provides for identification and/or selection of cells which received said vector

[0559] D. Meganucleases and MegaTALs

[0560] In certain embodiments, the CD70 inhibitor comprises a meganuclease (homing endonuclease) or a portion thereof that exhibits cleavage activity. In some embodiments, a “meganuclease,” also referred to as a “homing endonuclease,” refers to an endodeoxyribonuclease characterized by a large recognition site (double stranded DNA sequences of about 12 to about 40 base pairs). Naturally-occurring meganucleases recognize 15-40 base-pair cleavage sites and are commonly grouped into four families: the LAGLIDADG family, the GIY-YIG family, the His-Cyst box family and the HNH family. Exemplary homing endonucleases include I-SceI, I-CeuI, PI-PspI, PI-Sce, I-SceIV, I-CsmI, I-PanI, I-SceII, I-PpoI, I-SceIII, I-CreI, I-TevI, I-TevII and I-TevIII. Their recognition sequences are known. See also U.S. Pat. Nos. 5,420,032; 6,833,252; Belfort et al. Nucleic Acids Res. 25:3379-3388, 1997; Dujon et al. Gene 82:115-118, 1989; Perler et al. Nucleic Acids Res. 22, 1125-1127, 1994; Jasin Trends Genet. 12:224-228, 1996; Gimble et al. J. Mol. Biol. 263:163-180, 1996; Argast et al. J. Mol. Biol. 280:345-353, 1998, and the New England Biolabs catalogue.

[0561] In any of the nucleases described herein, the nuclease can comprise an engineered TALE DNA-binding domain and a nuclease domain (e.g., endonuclease and/or meganuclease domain), also referred to as TALENs. Methods and compositions for engineering these TALEN proteins for robust, site-specific interaction with the target sequence of the user's choosing have been published (see U.S. Pat. No. 8,586,526). In some embodiments, the TALEN comprises an endonuclease (e.g., FokI) cleavage domain or cleavage half-domain. In other embodiments, the TALE-nuclease is a mega TAL. These mega TAL nucleases are fusion proteins comprising a TALE DNA binding domain and a meganuclease cleavage domain. The meganuclease cleavage domain is active as a monomer and does not require dimerization for activity. (See Boissel et al., (2013) Nucl. Acid Res.: 42(4):2591-601). In addition, the nuclease domain may also exhibit DNA-binding functionality.

[0562] E. RGENs (CRISPR/Cas Systems)

[0563] In some embodiments, the CD70 inhibitor is a DNA-binding nucleic acid, such as alteration via an RNA-guided endonuclease (RGEN). For example, the CD70 inhibitor can be a clustered regularly interspaced short palindromic repeats (CRISPR) and CRISPR-associated (Cas) protein. In general, “CRISPR system” refers collectively to transcripts and other elements involved in the expression of or directing the activity of CRISPR-associated (“Cas”) genes, including sequences encoding a Cas gene, a tracr (trans-activating CRISPR) sequence (e.g. tracrRNA or an active partial tracrRNA), a tracr-mate sequence (encompassing a “direct repeat” and a tracrRNA-processed partial direct repeat in the context of an endogenous CRISPR system), a guide sequence (also referred to as a “spacer” in the context of an endogenous CRISPR system), and/or other sequences and transcripts from a CRISPR locus.

[0564] The CRISPR/Cas nuclease or CRISPR/Cas nuclease system can include a non-coding RNA molecule (guide) RNA, which sequence-specifically binds to DNA, and a Cas protein (e.g., Cas9), with nuclease functionality (e.g., two nuclease domains). One or more elements of a CRISPR system can derive from a type I, type II, or type III CRISPR system, e.g., derived from a particular organism comprising an endogenous CRISPR system, such as Streptococcus pyogenes.

[0565] In some aspects, a Cas nuclease and gRNA (including a fusion of crRNA specific for the target sequence and fixed tracrRNA) are introduced into the cell. In general, target sites at the 5′ end of the gRNA target the Cas nuclease to the target site, e.g., the gene, using complementary base pairing. The target site may be selected based on its location immediately 5′ of a protospacer adjacent motif (PAM) sequence, such as typically NGG, or NAG. In this respect, the gRNA is targeted to the desired sequence by modifying the first 20, 19, 18, 17, 16, 15, 14, 14, 12, 11, or 10 nucleotides of the guide RNA to correspond to the target DNA sequence. In general, a CRISPR system is characterized by elements that promote the formation of a CRISPR complex at the site of a target sequence. Typically, “target sequence” generally refers to a sequence to which a guide sequence is designed to have complementarity, where hybridization between the target sequence and a guide sequence promotes the formation of a CRISPR complex. Full complementarity is not necessarily required, provided there is sufficient complementarity to cause hybridization and promote formation of a CRISPR complex.

[0566] The CRISPR system can induce double stranded breaks (DSBs) at the target site, followed by disruptions or alterations as discussed herein. In other embodiments, Cas9 variants, deemed “nickases,” are used to nick a single strand at the target site. Paired nickases can be used, e.g., to improve specificity, each directed by a pair of different gRNAs targeting sequences such that upon introduction of the nicks simultaneously, a 5′ overhang is introduced. In other embodiments, catalytically inactive Cas9 is fused to a heterologous effector domain such as a transcriptional repressor or activator, to affect gene expression.

[0567] The target sequence may comprise any polynucleotide, such as DNA or RNA polynucleotides (e.g., a CD70 gene). The target sequence may be located in the nucleus or cytoplasm of the cell, such as within an organelle of the cell. Generally, a sequence or template that may be used for recombination into the targeted locus comprising the target sequences is referred to as an “editing template” or “editing polynucleotide” or “editing sequence.” In some aspects, an exogenous template polynucleotide may be referred to as an editing template. In some aspects, the recombination is homologous recombination.

[0568] Typically, in the context of an endogenous CRISPR system, formation of the CRISPR complex (comprising the guide sequence hybridized to the target sequence and complexed with one or more Cas proteins) results in cleavage of one or both strands in or near (e.g., within 1, 2, 3, 4, 5, 6, 7, 8, 9, 10, 20, 50, or more base pairs from) the target sequence. The tracr sequence, which may comprise or consist of all or a portion of a wild-type tracr sequence (e.g. about or more than about 20, 26, 32, 45, 48, 54, 63, 67, 85, or more nucleotides of a wild-type tracr sequence), may also form part of the CRISPR complex, such as by hybridization along at least a portion of the tracr sequence to all or a portion of a tracr mate sequence that is operably linked to the guide sequence. The tracr sequence has sufficient complementarity to a tracr mate sequence to hybridize and participate in formation of the CRISPR complex, such as at least 50%, 60%, 70%, 80%, 90%, 95% or 99% of sequence complementarity along the length of the tracr mate sequence when optimally aligned.

[0569] The components of a CRISPR system can be implemented in any suitable manner, meaning that the components of such systems including the RNA-guided nuclease (e.g., Cas enzyme) and gRNA can be delivered, formulated or administered in any suitable form to the cells. For example, the RNA-guided nuclease may be delivered to a cell complexed with a gRNA (e.g., as a ribonucleoprotein (RNP) complex), the RNA-guided nuclease may be delivered to a cell separate (e.g., uncomplexed) to a gRNA, the RNA-guided nuclease may be delivered to a cell as a polynucleotide (e.g., DNA or RNA) encoding the nuclease that is separate from a gRNA, or both the RNA-guided nuclease and the gRNA molecule may be delivered as polynucelotides encoding each component.

[0570] One or more vectors driving expression of one or more elements of the CRISPR system can be introduced into the cell such that expression of the elements of the CRISPR system direct formation of the CRISPR complex at one or more target sites. Components can also be delivered to cells as ribonucleoprotein complexes, proteins, DNA, and/or RNA. For example, a Cas enzyme, a guide sequence linked to a tracr-mate sequence, and a tracr sequence could each be operably linked to separate regulatory elements on separate vectors. Alternatively, two or more of the elements expressed from the same or different regulatory elements, may be combined in a single vector, with one or more additional vectors providing any components of the CRISPR system not included in the first vector. The vector may comprise one or more insertion sites, such as a restriction endonuclease recognition sequence (also referred to as a “cloning site”). In some embodiments, one or more insertion sites are located upstream and/or downstream of one or more sequence elements of one or more vectors. In addition, a nucleic acid encoding the endonuclease (e.g., a Cas enzyme such as Cas8 or Cas9) may be delivered with gRNAs. When multiple different guide sequences are used, a single expression construct may be used to target CRISPR activity to multiple different, corresponding target sequences within a cell.

[0571] A vector may comprise a regulatory element operably linked to an enzyme-coding sequence encoding the CRISPR enzyme, such as a Cas protein. Non-limiting examples of Cas proteins include Cas1, Cas1B, Cas2, Cas3, Cas4, Cas5, Cash, Cas7, Cas8, Cas8a, Cas8b, Cas8c, Cas9 (also known as Csn1 and Csx12), Cas10, Cas10d, Cas12, Cas12a (Cpf1), Cas12b (C2c1), Cas12c (C2c3), Cas12d (CasY), Cas12e (CasX), Cas12f (Cas14, C2c10), Cas12g, Cas12h, Cas12i, Cas12k (C2c5), C2c4, C2c8, C2c9, Cas13, Cas13a (C2c2), Cas13b, Cas13c, Cas13d, Csy1, Csy2, Csy3, Cse1, Cse2, Csc1, Csc2, Csa5, Csn2, Csm2, Csm3, Csm4, Csm5, Csm6, Cmr1, Cmr3, Cmr4, Cmr5, Cmr6, Csb1, Csb2, Csb3, Csx17, Csx14, Csx10, Csx11, Csx16, CsaX, Csx3, Csx1, Csx15, Csf1, Csf2, Csf3, Csf4, MAD7, GSU0054, homologs thereof, or modified versions thereof. These enzymes are known; for example, the amino acid sequence of S. pyogenes Cas9 protein may be found in the SWISSPROT database under accession number Q99ZW2.

[0572] The CRISPR enzyme can be Cas9 (e.g., from S. pyogenes or S. pneumonia). The CRISPR enzyme can direct cleavage of one or both strands at the location of a target sequence, such as within the target sequence and/or within the complement of the target sequence. The vector can encode a CRISPR enzyme that is mutated with respect to a corresponding wild-type enzyme such that the mutated CRISPR enzyme lacks the ability to cleave one or both strands of a target polynucleotide containing a target sequence. For example, an aspartate-to-alanine substitution (D10A) in the RuvC I catalytic domain of Cas9 from S. pyogenes converts Cas9 from a nuclease that cleaves both strands to a nickase (cleaves a single strand). In some embodiments, a Cas9 nickase may be used in combination with guide sequence(s), e.g., two guide sequences, which target respectively sense and antisense strands of the DNA target. This combination allows both strands to be nicked and used to induce NHEJ or HDR.

[0573] In some instances, the CRISPR enzyme can be Cas12a nuclease, such as MAD7. MAD7 is an engineered nuclease of the Class 2 type V-A CRISPR-Cas (Cas12a/Cpf1) family with a low level of homology to canonical Cas12a nucleases. MAD7 only requires a crRNA for gene editing and allows for specific targeting of AT rich regions of the genome. MAD7 cleaves DNA with a staggered cut as compared to S. pyogenes which has blunt cutting. The PAM sequence is YTTV, wherein Y indicates a C or T base, and V indicates A, C or G. The DNA cleavage sites for MAD7 relative to the target site are 19 bases after the YTTV PAM site on the sense strand and 23 bases after the complementary PAM site of the anti-sense strand.

[0574] In some embodiments, an enzyme coding sequence encoding the CRISPR enzyme is codon optimized for expression in particular cells, such as eukaryotic cells. The eukaryotic cells may be those of or derived from a particular organism, such as a mammal, including but not limited to human, mouse, rat, rabbit, dog, or non-human primate. In general, codon optimization refers to a process of modifying a nucleic acid sequence for enhanced expression in the host cells of interest by replacing at least one codon of the native sequence with codons that are more frequently or most frequently used in the genes of that host cell while maintaining the native amino acid sequence. Various species exhibit particular bias for certain codons of a particular amino acid. Codon bias (differences in codon usage between organisms) often correlates with the efficiency of translation of messenger RNA (mRNA), which is in turn believed to be dependent on, among other things, the properties of the codons being translated and the availability of particular transfer RNA (tRNA) molecules. The predominance of selected tRNAs in a cell is generally a reflection of the codons used most frequently in peptide synthesis. Accordingly, genes can be tailored for optimal gene expression in a given organism based on codon optimization.

[0575] In general, a guide sequence is any polynucleotide sequence having sufficient complementarity with a target polynucleotide sequence to hybridize with the target sequence and direct sequence-specific binding of the CRISPR complex to the target sequence. In some embodiments, the degree of complementarity between a guide sequence and its corresponding target sequence, when optimally aligned using a suitable alignment algorithm, is about or more than about 50%, 60%, 75%, 80%, 85%, 90%, 95%, 97.5%, 99%, or more.

[0576] Exemplary gRNA sequences for NR3CS (glucocorticoid receptor) include Ex3 NR3C1 sGl 5-TGC TGT TGA GGA GCT GGA-3 (SEQ ID NO: 687) and Ex3 NR3C1 sG2 5-AGC ACA CCA GGC AGA GTT-3 (SEQ ID NO: 688). Exemplary gRNA sequences for TGF-beta receptor 2 include EX3 TGFBR2 sGl 5-CGG CTG AGG AGC GGA AGA-3 (SEQ ID NO: 689) and EX3 TGFBR2 sG2 5-TGG-AGG-TGA-GCA-ATC-CCC-3 (SEQ ID NO: 690). The T7 promoter, target sequence, and overlap sequence may have the sequence TTAATACGACTCACTATAGG (SEQ ID NO: 691)+target sequence+gttttagagctagaaatagc (SEQ ID NO: 692).

[0577] In some embodiments the CD70 inhibitor comprises an RNA-guided endonuclease and a guide RNA (gRNA) targeting a CD70 gene. Exemplary gRNA sequences for CD70 comprise the nucleic acid sequence of SEQ ID NO: 2685, or SEQ ID NO: 2686. In some embodiments, the CD70 inhibitor comprises an RNA-guided endonuclease (e.g., a Cas enzyme such as Cas8 and Cas9) and a gRNA comprising the nucleic acid sequence of any one of SEQ ID Nos: 2682-2686 or 2883-2945.

[0578] Optimal alignment may be determined with the use of any suitable algorithm for aligning sequences, non-limiting example of which include the Smith-Waterman algorithm, the Needleman-Wunsch algorithm, algorithms based on the Burrows-Wheeler Transform (e.g., the Burrows Wheeler Aligner), Clustal W, Clustal X, BLAT, Novoalign (Novocraft Technologies, ELAND (Illumina, San Diego, Calif.), SOAP (available at soap.genomics.org.cn), and Maq (available at maq.sourceforge.net).

[0579] The CRISPR enzyme may be part of a fusion protein comprising one or more heterologous protein domains. A CRISPR enzyme fusion protein may comprise any additional protein sequence, and optionally a linker sequence between any two domains. Examples of protein domains that may be fused to a CRISPR enzyme include, without limitation, epitope tags, reporter gene sequences, and protein domains having one or more of the following activities: methylase activity, demethylase activity, transcription activation activity, transcription repression activity, transcription release factor activity, histone modification activity, RNA cleavage activity and nucleic acid binding activity. Non-limiting examples of epitope tags include histidine (His) tags, V5 tags, FLAG tags, influenza hemagglutinin (HA) tags, Myc tags, VSV-G tags, and thioredoxin (Trx) tags. Examples of reporter genes include, but are not limited to, glutathione-5-transferase (GST), horseradish peroxidase (HRP), chloramphenicol acetyltransferase (CAT) beta galactosidase, beta-glucuronidase, luciferase, green fluorescent protein (GFP), HcRed, DsRed, cyan fluorescent protein (CFP), yellow fluorescent protein (YFP), and autofluorescent proteins including blue fluorescent protein (BFP). A CRISPR enzyme may be fused to a gene sequence encoding a protein or a fragment of a protein that bind DNA molecules or bind other cellular molecules, including but not limited to maltose binding protein (MBP), S-tag, Lex A DNA-binding domain (DBD) fusions, GAL4A DNA binding domain fusions, and herpes simplex virus (HSV) BP16 protein fusions. Additional domains that may form part of a fusion protein comprising a CRISPR enzyme are described in US Patent Appl. Publ. No. 2011/0059502, incorporated herein by reference.

[0580] In some embodiments, the immune cells (e.g., NK cells) of the present disclosure are modified by one or more methods described herein to have reduced levels of CD70. In particular, NK cells can be contacted with a CD70 inhibitor that is a nucleic acid (e.g., RNAi, siRNA, shRNA, tandem shRNA, and/or ribozymes) targeting CD70 mRNA, such that expression of CD70 is reduced or depleted in the genetically engineered NK cell as compared to the expression of CD70 in a control NK cell (e.g., a wild-type NK cell and/or a NK cell that has not been contacted with the CD70 inhibitor). In some instances, as compared to a control NK cell, CD70 expression or CD70 level in a NK cell that is contacted with a CD70 inhibitor is reduced by about 1% to about 100% (e.g., by about 1% to about 95%, about 1% to about 90%, about 1% to about 85%, about 1% to about 80%, about 1% to about 75%, about 1% to about 70%, about 1% to about 65%, about 1% to about 60%, about 1% to about 55%, about 1% to about 50%, about 1% to about 45%, about 1% to about 40%, about 1% to about 35%, about 1% to about 30%, about 1% to about 25%, about 1% to about 20%, about 1% to about 15%, about 1% to about 10%, about 1% to about 5%, about 10% to about 100%, about 10% to about 95%, about 10% to about 90%, about 10% to about 85%, about 10% to about 80%, about 10% to about 75%, about 10% to about 70%, about 10% to about 65%, about 10% to about 60%, about 10% to about 55%, about 10% to about 50%, about 10% to about 45%, about 10% to about 40%, about 10% to about 35%, about 10% to about 30%, about 10% to about 25%, about 10% to about 20%, about 10% to about 15%, about 20% to about 100%, about 20% to about 95%, about 20% to about 90%, about 20% to about 85%, about 20% to about 80%, about 20% to about 75%, about 20% to about 70%, about 20% to about 65%, about 20% to about 60%, about 20% to about 55%, about 20% to about 50%, about 20% to about 45%, about 20% to about 40%, about 20% to about 35%, about 20% to about 30%, about 20% to about 25%, about 30% to about 100%, about 30% to about 95%, about 30% to about 90%, about 30% to about 85%, about 30% to about 80%, about 30% to about 75%, about 30% to about 70%, about 30% to about 65%, about 30% to about 60%, about 30% to about 55%, about 30% to about 50%, about 30% to about 45%, about 30% to about 40%, about 30% to about 35%, about 40% to about 100%, about 40% to about 95%, about 40% to about 90%, about 40% to about 85%, about 40% to about 80%, about 40% to about 75%, about 40% to about 70%, about 40% to about 65%, about 40% to about 60%, about 40% to about 55%, about 40% to about 50%, about 40% to about 45%, about 50% to about 100%, about 50% to about 95%, about 50% to about 90%, about 50% to about 85%, about 50% to about 80%, about 50% to about 75%, about 50% to about 70%, about 50% to about 65%, about 50% to about 60%, about 50% to about 55%, about 60% to about 100%, about 60% to about 95%, about 60% to about 90%, about 60% to about 85%, about 60% to about 80%, about 60% to about 75%, about 60% to about 70%, about 60% to about 65%, about 70% to about 100%, about 70% to about 95%, about 70% to about 90%, about 70% to about 85%, about 70% to about 80%, about 70% to about 75%, about 80% to about 100%, about 80% to about 95%, about 80% to about 90%, about 80% to about 85%, about 90% to about 100%, about 90% to about 95%, or about 95% to about 100%) as compared to the CD70 expression or CD70 level in a control NK cell (e.g., a wild-type NK cell and/or a NK cell that has not been contacted with the CD70 inhibitor). In certain instances, CD70 expression or CD70 level in a NK cell is determined about 3-10 days (e.g., 3, 4, 5, 6, 7, 8, 9 or 10 days) after the NK cell is contacted with the CD70 inhibitor. For example, in some instances, 3-10 days after a NK cell is contacted with a CD70 inhibitor, a CD70 level or expression in the NK cell is found to be reduced, as compared to a control NK cell (e.g., a wild-type NK cell and/or a NK cell that has not been contacted with the CD70 inhibitor).

### IV. Methods of Use

[0581] In some embodiments, the present disclosure provides methods for immunotherapy comprising administering an effective amount of the genetically engineered immune cells of the present disclosure. In some embodiments, a medical disease or disorder is treated by transfer of an immune cell population that elicits an immune response. In certain embodiments of the present disclosure, cancer or infection is treated by transfer of a genetically engineered immune cell population that elicits an immune response. Provided herein are methods for treating or delaying progression of cancer in an individual comprising administering to the individual an effective amount an antigen-specific population of genetically engineered immune cells (e.g., genetically engineered NK cells). The present methods may be applied for the treatment of immune disorders, solid cancers, hematologic cancers, and viral infections.

[0582] Tumors for which the present treatment methods are useful include any malignant cell type, such as those found in a solid tumor or a hematological tumor. In some embodiments, the cancer is a CD70-positive cancer. Exemplary solid tumors can include, but are not limited to, a tumor of an organ selected from the group consisting of pancreas, colon, cecum, stomach, brain (e.g., dysembryoplastic neuroepithelial tumor), head, neck, ovary (e.g., ovarian epithelial tumor), kidney, larynx, sarcoma, lung, bladder (e.g., bladder urothelial carcinoma), melanoma, prostate, and breast. Exemplary hematological tumors include tumors of the bone marrow, T or B cell malignancies (e.g., mature B cell neoplasms), leukemias (e.g., acute myeloid leukemia (AML)), lymphomas (e.g., non-Hodgkin's lymphoma), blastomas, myelomas, and the like. Further examples of cancers that may be treated using the methods provided herein include, but are not limited to, lung cancer (including small-cell lung cancer, non-small cell lung cancer, adenocarcinoma of the lung, and squamous carcinoma of the lung), pleural mesothelioma, cancer of the peritoneum, gastric or stomach cancer (including esophagogastric squamous cell carcinoma, stomach adenocarcinoma, gastrointestinal cancer and gastrointestinal stromal cancer), pancreatic cancer (e.g., pancreatic adenocarcinoma), cervical cancer (e.g., cervical squamous cell carcinoma and cervical adenocarcinoma), ovarian cancer, liver cancer (e.g., fibrolamellar carcinoma and hepatocellular carcinoma), bladder cancer, breast cancer (e.g., invasive breast carcinoma), colon cancer, colorectal cancer (e.g., colorectal adenocarcinoma), endometrial or uterine carcinoma, salivary gland carcinoma, kidney or renal cancer (e.g., renal clear cell carcinoma (RCC), renal non-clear cell carcinoma), prostate cancer (e.g., prostate adenocarcinoma), vulval cancer, thyroid cancer, various types of head and neck cancer (e.g., head and neck squamous cell carcinoma), esophageal cancer (e.g., esophageal squamous cell carcinoma), sarcoma, seminoma, non-seminomatous germ cell tumor, thymic epithelial tumor, glioblastoma, cholangiocarcinoma, adrenocortical carcinoma, glioma (e.g., encapsulated glioma and diffuse glioma), pheochromocytoma, and melanoma (e.g., ocular melanoma). In some embodiments, the present treatment methods are useful for treating an HTLV-1-associated malignancy or an EBV-associated malignancy.

[0583] The cancer may specifically be of the following histological type, though it is not limited to these: neoplasm, malignant; carcinoma; carcinoma, undifferentiated; giant and spindle cell carcinoma; small cell carcinoma; papillary carcinoma; squamous cell carcinoma; lymphoepithelial carcinoma; basal cell carcinoma; pilomatrix carcinoma; transitional cell carcinoma; papillary transitional cell carcinoma; adenocarcinoma; gastrinoma, malignant; cholangiocarcinoma; hepatocellular carcinoma; combined hepatocellular carcinoma and cholangiocarcinoma; trabecular adenocarcinoma; adenoid cystic carcinoma; adenocarcinoma in adenomatous polyp; adenocarcinoma, familial polyposis coli; solid carcinoma; carcinoid tumor, malignant; branchiolo-alveolar adenocarcinoma; papillary adenocarcinoma; chromophobe carcinoma; acidophil carcinoma; oxyphilic adenocarcinoma; basophil carcinoma; clear cell adenocarcinoma; granular cell carcinoma; follicular adenocarcinoma; papillary and follicular adenocarcinoma; nonencapsulating sclerosing carcinoma; adrenal cortical carcinoma; endometroid carcinoma; skin appendage carcinoma; apocrine adenocarcinoma; sebaceous adenocarcinoma; ceruminous adenocarcinoma; mucoepidermoid carcinoma; cystadenocarcinoma; papillary cystadenocarcinoma; papillary serous cystadenocarcinoma; mucinous cystadenocarcinoma; mucinous adenocarcinoma; signet ring cell carcinoma; infiltrating duct carcinoma; medullary carcinoma; lobular carcinoma; inflammatory carcinoma; Paget's disease, mammary; acinar cell carcinoma; adenosquamous carcinoma; adenocarcinoma w/squamous metaplasia; thymoma, malignant; ovarian stromal tumor, malignant; thecoma, malignant; granulosa cell tumor, malignant; androblastoma, malignant; Sertoli cell carcinoma; Leydig cell tumor, malignant; lipid cell tumor, malignant; paraganglioma, malignant; extra-mammary paraganglioma, malignant; pheochromocytoma; glomangiosarcoma; malignant melanoma; amelanotic melanoma; superficial spreading melanoma; lentigo malignant melanoma; acral lentiginous melanomas; nodular melanomas; malignant melanoma in giant pigmented nevus; epithelioid cell melanoma; blue nevus, malignant; sarcoma; fibrosarcoma; fibrous histiocytoma, malignant; myxosarcoma; liposarcoma; leiomyosarcoma; rhabdomyosarcoma; embryonal rhabdomyosarcoma; alveolar rhabdomyosarcoma; stromal sarcoma; mixed tumor, malignant; mullerian mixed tumor; nephroblastoma; hepatoblastoma; carcinosarcoma; mesenchymoma, malignant; brenner tumor, malignant; phyllodes tumor, malignant; synovial sarcoma; mesothelioma, malignant; dysgerminoma; embryonal carcinoma; teratoma, malignant; struma ovarii, malignant; choriocarcinoma; mesonephroma, malignant; hemangiosarcoma; hemangioendothelioma, malignant; kaposi's sarcoma; hemangiopericytoma, malignant; lymphangiosarcoma; osteosarcoma; juxtacortical osteosarcoma; chondrosarcoma; chondroblastoma, malignant; mesenchymal chondrosarcoma; giant cell tumor of bone; Ewing's sarcoma; odontogenic tumor, malignant; ameloblastic odontosarcoma; ameloblastoma, malignant; ameloblastic fibrosarcoma; pinealoma, malignant; chordoma; glioma, malignant; ependymoma; astrocytoma; protoplasmic astrocytoma; fibrillary astrocytoma; astroblastoma; glioblastoma; oligodendroglioma; oligodendroblastoma; primitive neuroectodermal; cerebellar sarcoma; ganglioneuroblastoma; neuroblastoma; retinoblastoma; olfactory neurogenic tumor; meningioma, malignant; neurofibrosarcoma; neurilemmoma, malignant; granular cell tumor, malignant; malignant lymphoma; Hodgkin's disease; Hodgkin's; paragranuloma; malignant lymphoma, small lymphocytic; malignant lymphoma, large cell, diffuse; malignant lymphoma, follicular; mycosis fungoides; other specified non-Hodgkin's lymphomas; B cell lymphoma; low grade/follicular non-Hodgkin's lymphoma (NHL); small lymphocytic (SL) NHL; intermediate grade/follicular NHL; intermediate grade diffuse NHL; high grade immunoblastic NHL; high grade lymphoblastic NHL; high grade small non-cleaved cell NHL; bulky disease NHL; mantle cell lymphoma; AIDS-related lymphoma; Waldenstrom's macroglobulinemia; malignant histiocytosis; multiple myeloma; mast cell sarcoma; immunoproliferative small intestinal disease; leukemia; lymphoid leukemia; plasma cell leukemia; erythroleukemia; lymphosarcoma cell leukemia; myeloid leukemia; basophilic leukemia; eosinophilic leukemia; monocytic leukemia; mast cell leukemia; megakaryoblastic leukemia; myeloid sarcoma; hairy cell leukemia; chronic lymphocytic leukemia (CLL); acute lymphoblastic leukemia (ALL); acute myeloid leukemia (AML); myelodysplastic syndrome (MDS); chronic myeloblasts leukemia; diffuse large B cell lymphoma (DLBCL); peripheral T-cell lymphoma (PTCL); or anaplastic large cell lymphoma (ALCL).

[0584] Acute myeloid leukemia (AML) is a type of cancer in which the bone marrow makes abnormal myeloblasts. It is the most common form of acute leukemia in adults (Siegel et al. CA Cancer J. Clin. 64(1):9-29 (2014)). AML is a rapidly progressive disease with a median age at onset of 65 to 70 years. AML is known by many names, including acute myelocytic leukemia, acute myelogenous leukemia, acute granulocytic leukemia, and acute non-lymphocytic leukemia. “Acute” denotes the aggressive nature of this disease that can progress quickly, and if not treated, is fatal within a few months of diagnosis. The cancer originates in the bone marrow but rapidly spreads via the blood to other anatomical sites. The disease is observed in both children and adults, but is more common in the elderly. The chance of getting AML increases with age, but a person can get AML at any age. About 8 in 10 adults with acute leukemia have AML and about 1 in 6 children with leukemia will have AML. An average of 12,000 new cases of AML is expected on a yearly basis with approximately 30,000 patients living with or experiencing remission currently in the US.

[0585] Among elderly AML patients (>65 years of age), median survival is short (ranging from 3.9 months for patients 65 to 74 years of age to 1.4 months for patients>85 years of age). Treatment options for AML patients are limited, and outcomes are usually poor with an average 5-year survival rate of 20%, and less than a 5% 5-year survival rate for patients older than 65 (Thein et al. Cancer 119(15):2720-7, 2013). Certain subgroups of AML have a particularly worse outcome such as patients with abnormalities in chromosome 7, complex karyotype, relapsed and/or refractory AML and AML arising from antecedent myelodysplastic syndrome (MDS) or myeloproliferative neoplasms (MPNs). Patients aged 65 years and older with AML are more likely than younger patients to have unfavorable-risk cytogenetics. These cytogenetic factors are associated with resistance to chemotherapy and show considerably lower response rates to therapy. In addition to response rate, older patients with AML are often either not considered candidates for or choose not to receive standard induction chemotherapy because of poor tolerability and treatment outcomes. Induction chemotherapy is associated with high rates of treatment-related mortality and low complete response (CR) rates in this subset of patients. Currently, there are no approved therapies for AML patients who do not receive standard induction chemotherapy. The paucity of therapies and the poor response rates attributed to certain cytogenetic factors make AML an unmet medical need for new agents demonstrating clinical benefit with a favorable safety profile.

[0586] Hematopoiesis is characterized by the tissue specific hierarchical differentiation from pluripotent stem cells to more mature differentiated cellular phenotypes. Similar to the homeostatic hematopoiesis, AML is believed to arise form mutations accumulating in this quiescent stem cell population, which gives rise to the leukemic stem cell (LSC). The inability to eliminate this AML LSC population will result in relapse and therapeutic failure.

[0587] Although most patients with AML will achieve remission with induction chemotherapy; many will relapse, despite the administration of post-remission consolidation therapies. Relapses may occur weeks to many years later. Up to 10% of patients will be refractory to induction chemotherapy. Both of these groups of patients (relapsed/refractory) constitute a particularly poor risk group. Although an allogeneic stem cell transplant would be considered a recommended approach for those patients who respond to salvage therapies, it is feasible only in a small number of patients and is associated with significant morbidity and mortality (Hamadani et al. Biol. Blood Marrow Transplant. 5:556-67, 2008). In addition, outcomes for patients transplanted with refractory disease are poor (Duval et al. J. Clin. Oncol. 28(23):3730-8, 2010) and almost half of patients with relapsed disease are chemorefractory and thus not suitable for transplantation (Hamadani et al. Biol. Blood Marrow Transplant. 5:556-67, 2008), (Estey Am. J. Hematol. 88(4):318-27, 2013). Many novel drugs and approaches are being investigated for this group of patients. However, the CR rates have been, in general, less than 30% (Litzow et al. Br. J. Haemotol. 148:217-25, 2010), (Cortes et al. Cancer 118(2):418-27, 2012), (Kirschbaum et al. Leukemia 25(10): 1543-7, 2011).

[0588] In AML patients, cytogenetics are important prognostic factors in predicting response to treatment (Grimwade et al. Blood 92(7):2322-33, 1998). Patients with AML whose leukemic cells have translocations t(8;21), t(15; 17), t(16; 16), or inv(16) have a favorable outcome with induction chemotherapy and intensive post-remission consolidation chemotherapy. However, abnormalities of chromosomes 5 or 7,11q23 or complex karyotypes have a very poor outcome with currently available induction and post remission chemotherapy. Patients with a normal karyotype or with trisomy 8 have an intermediate prognosis. Among adults with AML, t(9;22) or t(4; 11) confer a very poor prognosis. Patients with t(9;22) AML are rarely, if ever, cured with chemotherapy alone. The immunophenotypic determination of surface antigens expressed on leukemic blast cells may aid in diagnosis and has important implications for treatment and prognosis of myeloid, T, and B lineage leukemias. Given that increases in long-term AML survival have proven elusive using conventional therapies, novel treatment strategies are needed.

[0589] Particular embodiments concern methods of treatment of leukemia. Leukemia is a cancer of the blood or bone marrow and is characterized by an abnormal proliferation (production by multiplication) of blood cells, usually immature white blood cells (leukocytes). It is part of the broad group of diseases called hematological neoplasms. Leukemia is a broad term covering a spectrum of diseases. Leukemia is clinically and pathologically split into its acute and chronic forms and/or by and the cell type of origin (myeloid or lymphoid).

[0590] In certain embodiments of the present disclosure, immune cells are delivered to an individual in need thereof, such as an individual that has cancer or an infection. The cells then enhance the individual's immune system to attack or directly attack the respective cancer or pathogenic cells. In some cases, the individual is provided with one or more doses of the immune cells. In cases where the individual is provided with two or more doses of the immune cells, the duration between the administrations should be sufficient to allow time for propagation in the individual, and in specific embodiments the duration between doses is 1, 2, 3, 4, 5, 6, 7, 8, 9, 10, 11, or 12 or more weeks.

[0591] Certain embodiments of the present disclosure provide methods for treating or preventing an immune-mediated disorder. In some embodiments, the subject has an autoimmune disease. Non-limiting examples of autoimmune diseases include: alopecia areata, ankylosing spondylitis, antiphospholipid syndrome, autoimmune Addison's disease, autoimmune diseases of the adrenal gland, autoimmune hemolytic anemia, autoimmune hepatitis, autoimmune oophoritis and orchitis, autoimmune thrombocytopenia, Bechcet's disease, bullous pemphigoid, cardiomyopathy, celiac spate-dermatitis, chronic fatigue immune dysfunction syndrome (CFIDS), chronic inflammatory demyelinating polyneuropathy, Churg-Strauss syndrome, cicatrical pemphigoid, CREST syndrome, cold agglutinin disease, Crohn's disease, discoid lupus, essential mixed cryoglobulinemia, fibromyalgia-fibromyositis, glomerulonephritis, Graves' disease, Guillain-Barre, Hashimoto's thyroiditis, idiopathic pulmonary fibrosis, idiopathic thrombocytopenia purpura (ITP), IgA neuropathy, juvenile arthritis, lichen planus, lupus erythematosus, Meniere's disease, mixed connective tissue disease, multiple sclerosis, type 1 or immune-mediated diabetes mellitus, myasthenia gravis, nephrotic syndrome (such as minimal change disease, focal glomerulosclerosis, or membranous nephropathy), pemphigus vulgaris, pernicious anemia, polyarteritis nodosa, polychondritis, polyglandular syndromes, polymyalgia rheumatica, polymyositis and dermatomyositis, primary agammaglobulinemia, primary biliary cirrhosis, psoriasis, psoriatic arthritis, Raynaud's phenomenon, Reiter's syndrome, Rheumatoid arthritis, sarcoidosis, scleroderma, Sjogren's syndrome, stiff-man syndrome, systemic lupus erythematosus, lupus erythematosus, ulcerative colitis, uveitis, vasculitides (such as polyarteritis nodosa, takayasu arteritis, temporal arteritis/giant cell arteritis, or dermatitis herpetiformis vasculitis), vitiligo, and Wegener's granulomatosis. Thus, some examples of an autoimmune disease that can be treated using the methods disclosed herein include, but are not limited to, multiple sclerosis, rheumatoid arthritis, systemic lupus erythematosus, type I diabetes mellitus, Crohn's disease; ulcerative colitis, myasthenia gravis, glomerulonephritis, ankylosing spondylitis, vasculitis, or psoriasis. The subject can also have an allergic disorder such as Asthma.

[0592] In yet another embodiment, the subject is the recipient of a transplanted organ or stem cells and immune cells are used to prevent and/or treat rejection. In particular embodiments, the subject has or is at risk of developing graft versus host disease. GVHD is a possible complication of any transplant that uses or contains stem cells from either a related or an unrelated donor. There are two kinds of GVHD, acute and chronic. Acute GVHD appears within the first three months following transplantation. Signs of acute GVHD include a reddish skin rash on the hands and feet that may spread and become more severe, with peeling or blistering skin. Acute GVHD can also affect the stomach and intestines, in which case cramping, nausea, and diarrhea are present. Yellowing of the skin and eyes (jaundice) indicates that acute GVHD has affected the liver. Chronic GVHD is ranked based on its severity: stage/grade 1 is mild; stage/grade 4 is severe. Chronic GVHD develops three months or later following transplantation. The symptoms of chronic GVHD are similar to those of acute GVHD, but in addition, chronic GVHD may also affect the mucous glands in the eyes, salivary glands in the mouth, and glands that lubricate the stomach lining and intestines. Any of the populations of immune cells disclosed herein can be utilized. Examples of a transplanted organ include a solid organ transplant, such as kidney, liver, skin, pancreas, lung and/or heart, or a cellular transplant such as islets, hepatocytes, myoblasts, bone marrow, or hematopoietic or other stem cells. The transplant can be a composite transplant, such as tissues of the face. Immune cells can be administered prior to transplantation, concurrently with transplantation, or following transplantation. In some embodiments, the immune cells are administered prior to the transplant, such as at least 1 hour, at least 12 hours, at least 1 day, at least 2 days, at least 3 days, at least 4 days, at least 5 days, at least 6 days, at least 1 week, at least 2 weeks, at least 3 weeks, at least 4 weeks, or at least 1 month prior to the transplant. In one specific, non-limiting example, administration of the therapeutically effective amount of immune cells occurs 3-5 days prior to transplantation.

[0593] In some embodiments, the subject can be administered nonmyeloablative lymphodepleting chemotherapy prior to the immune cell therapy. The nonmyeloablative lymphodepleting chemotherapy can be any suitable such therapy, which can be administered by any suitable route. The nonmyeloablative lymphodepleting chemotherapy can comprise, for example, the administration of cyclophosphamide and fludarabine. An exemplary route of administering cyclophosphamide and fludarabine is intravenously. Likewise, any suitable dose of cyclophosphamide and fludarabine can be administered. In particular aspects, around 60 mg/kg of cyclophosphamide is administered for two days after which around 25 mg/m² fludarabine is administered for five days.

[0594] In some embodiments, the subject can be administered nonmyeloablative lymphodepleting immunotherapy prior to the genetically engineered immune cells (e.g., genetically engineered NK cells). The nonmyeloablative lymphodepleting immunotherapy can be any suitable such therapy, which can be administered by any suitable route. The nonmyeloablative lymphodepleting immunotherapy can comprise, for example, the administration of an anti-CD52 agent or anti-CD20 agent. In some embodiments, the lymphodepleting immunotherapy is an anti-CD52 antibody. In some embodiments, the anti-CD52 antibody is alemtuzumab. In some embodiments, the lymphodepleting immunotherapy is an anti-CD20 antibody. Exemplary anti-CD20 antibodies include, but are not limited to rituximab, ofatumumab, ocrelizumab, obinutuzumab, ibritumomab or iodine i131 tositumomab. An exemplary route of administering anti-CD52 agent or anti-CD20 agent is intravenously. Likewise, any suitable dose of anti-CD52 agent or anti-agent can be administered.

[0595] In certain embodiments, a growth factor that promotes the growth and activation of the immune cells is administered to the subject either concomitantly with the immune cells or subsequently to the immune cells. The immune cell growth factor can be any suitable growth factor that promotes the growth and activation of the immune cells. Examples of suitable immune cell growth factors include interleukin (IL)-2, IL-7, IL-15, and IL-12, which can be used alone or in various combinations, such as IL-2 and IL-7, IL-2 and IL-15, IL-7 and IL-15, IL-2, IL-7 and IL-15, IL-12 and IL-7, IL-12 and IL-15, or IL-12 and IL2.

[0596] Therapeutically effective amounts of genetically engineered immune cells can be administered by a number of routes, including parenteral administration, for example, intravenous, intraperitoneal, intramuscular, intrasternal, or intraarticular injection, or infusion.

[0597] The therapeutically effective amount of genetically engineered immune cells for use in adoptive cell therapy is that amount that achieves a desired effect in a subject being treated. For instance, this can be the amount of genetically engineered immune cells necessary to inhibit advancement, or to cause regression of an autoimmune or alloimmune disease, or which is capable of relieving symptoms caused by an autoimmune disease, such as pain and inflammation. It can be the amount necessary to relieve symptoms associated with inflammation, such as pain, edema and elevated temperature. It can also be the amount necessary to diminish or prevent rejection of a transplanted organ.

[0598] The genetically engineered immune cell population can be administered in treatment regimens consistent with the disease, for example a single or a few doses over one to several weeks to ameliorate a disease state or periodic doses over an extended time to inhibit disease progression and prevent disease recurrence. The precise dose to be employed in the formulation will also depend on the route of administration, and the seriousness of the disease or disorder. The therapeutically effective amount of genetically engineered immune cells will be dependent on the subject being treated, the severity and type of the affliction, and the manner of administration. In some embodiments, doses that could be used in the treatment of human subjects range from at least 3.8×10⁴, at least 3.8×10⁵, at least 3.8×10⁶, at least 3.8×10⁷, at least 3.8×10⁸, at least 3.8×10⁹, or at least 3.8×10¹⁰ genetically engineered immune cells/m². In a certain embodiment, the dose used in the treatment of human subjects ranges from about 3.8×10⁹ to about 3.8×10¹⁰ genetically engineered immune cells/m². In additional embodiments, a therapeutically effective amount of genetically engineered immune cells can vary from about 5×10⁶ cells per kg body weight to about 7.5×10⁸ cells per kg body weight, such as from about 2×10⁷ cells to about 5×10⁸ cells per kg body weight, or from about 5×10⁷ cells to about 2×10⁸ cells per kg body weight, or from about 5×10⁶ cells per kg body weight to about 1×10⁷ cells per kg body weight. In some embodiments, a therapeutically effective amount of genetically engineered immune cells ranges from about 1×10⁵ cells per kg body weight to about 10×10⁹ cells per kg body weight. The exact amount of genetically engineered immune cells is readily determined by one of skill in the art based on the age, weight, sex, and physiological condition of the subject. Effective doses can be extrapolated from dose-response curves derived from in vitro or animal model test systems.

[0599] The genetically engineered immune cells may be administered in combination with one or more other therapeutic agents for the treatment of the immune-mediated disorder. Combination therapies can include, but are not limited to, one or more anti-microbial agents (for example, antibiotics, anti-viral agents and anti-fungal agents), anti-tumor agents (for example, fluorouracil, methotrexate, paclitaxel, fludarabine, etoposide, doxorubicin, or vincristine), immune-depleting agents (for example, fludarabine, etoposide, doxorubicin, or vincristine), immunosuppressive agents (for example, azathioprine, or glucocorticoids, such as dexamethasone or prednisone), anti-inflammatory agents (for example, glucocorticoids such as hydrocortisone, dexamethasone or prednisone, or non-steroidal anti-inflammatory agents such as acetyls alicylic acid, ibuprofen or naproxen sodium), cytokine antagonists (for example, anti-TNF and anti-IL-6), cytokines (for example, interleukin-10 or transforming growth factor-beta), hormones (for example, estrogen), or a vaccine. In addition, immunosuppressive or tolerogenic agents including but not limited to calcineurin inhibitors (e.g., cyclosporin and tacrolimus); mTOR inhibitors (e.g., Rapamycin); mycophenolate mofetil, antibodies (e.g., recognizing CD3, CD4, CD40, CD154, CD45, IVIG, or B cells); chemotherapeutic agents (e.g., Methotrexate, Treosulfan, Busulfan); irradiation; or chemokines, interleukins or their inhibitors (e.g., BAFF, IL-2, anti-IL-2R, IL-4, JAK kinase inhibitors) can be administered. Such additional pharmaceutical agents can be administered before, during, or after administration of the genetically engineered immune cells, depending on the desired effect. This administration of the genetically engineered immune cells and the agent can be by the same route or by different routes, and either at the same site or at a different site.

### 1. Pharmaceutical Compositions

[0600] Also provided herein are pharmaceutical compositions and formulations comprising genetically engineered immune cells (e.g., NK cells) and a pharmaceutically acceptable carrier.

[0601] In some embodiments, a pharmaceutical composition comprises a dose ranging from about 1×10⁵ NK cells to about 1×10⁹ NK cells. In some embodiments, the dose is about 1×10⁵, 1×10⁶, 1×10⁷, 1×10⁸ or 1×10⁹NK cells. In some embodiments, a pharmaceutical composition comprises a dose ranging from about 5×10⁵ NK cells to about 10×10¹² NK cells.

[0602] In some embodiments, a pharmaceutical composition is cryopreserved. In some embodiments, at least 10, at least 15, at least 20, at least 25, at least 30, at least 35, at least 40, at least 45, at least 50, at least 55, at least 60, at least 65, at least 70, at least 75, at least 80, at least 85, at least 90, at least 91, at least 92, at least 93, at least 94, at least 95, at least 96, at least 97, at least 98, at least 99% of the genetically engineered NK cells in the cryopreserved pharmaceutical composition specifically bind human CD70 after thawing.

[0603] Pharmaceutical compositions and formulations as described herein can be prepared by mixing the active ingredients (such as an antibody or a polypeptide) having the desired degree of purity with one or more optional pharmaceutically acceptable carriers (Remington's Pharmaceutical Sciences 22^{nd} edition, 2012), in the form of aqueous solutions. Pharmaceutically acceptable carriers are generally nontoxic to recipients at the dosages and concentrations employed, and include, but are not limited to: buffers such as phosphate, citrate, and other organic acids; antioxidants including ascorbic acid and methionine; preservatives (such as octadecyldimethylbenzyl ammonium chloride; hexamethonium chloride; benzalkonium chloride; benzethonium chloride); low molecular weight (less than about 10 residues) polypeptides; proteins, such as serum albumin, gelatin, or immunoglobulins; hydrophilic polymers such as polyvinylpyrrolidone; amino acids such as glycine, glutamine, asparagine, histidine, arginine, or lysine; monosaccharides, disaccharides, and other carbohydrates including glucose, mannose, or dextrins; chelating agents such as EDTA; sugars such as sucrose, mannitol, trehalose or sorbitol; salt-forming counter-ions such as sodium; and/or non-ionic surfactants such as polyethylene glycol (PEG).

### 2. Combination Therapies

[0604] In some embodiments, the compositions and methods of the present embodiments involve a genetically engineered immune cell population in combination with at least one additional therapy. The additional therapy may be radiation therapy, surgery (e.g., lumpectomy and a mastectomy), chemotherapy, gene therapy, DNA therapy, viral therapy, RNA therapy, immunotherapy, bone marrow transplantation, nanotherapy, monoclonal antibody therapy, or a combination of the foregoing. The additional therapy may be in the form of adjuvant or neoadjuvant therapy.

[0605] In some embodiments, the additional therapy is the administration of small molecule enzymatic inhibitor or anti-metastatic agent. In some embodiments, the additional therapy is the administration of side-effect limiting agents (e.g., agents intended to lessen the occurrence and/or severity of side effects of treatment, such as anti-nausea agents, etc.). In some embodiments, the additional therapy is radiation therapy. In some embodiments, the additional therapy is surgery. In some embodiments, the additional therapy is a combination of radiation therapy and surgery. In some embodiments, the additional therapy is gamma irradiation. In some embodiments, the additional therapy is therapy targeting PBK/AKT/mTOR pathway, HSP90 inhibitor, tubulin inhibitor, apoptosis inhibitor, and/or chemopreventative agent. The additional therapy may be one or more of the chemotherapeutic agents known in the art.

[0606] A genetically engineered immune cell may be administered before, during, after, or in various combinations relative to an additional cancer therapy, such as immune checkpoint therapy. The administrations may be in intervals ranging from concurrently to minutes to days to weeks. In embodiments where the immune cell therapy is provided to a patient separately from an additional therapeutic agent, one would generally ensure that a significant period of time did not expire between the time of each delivery, such that the two compounds would still be able to exert an advantageously combined effect on the patient. In such instances, it is contemplated that one may provide a patient with the antibody therapy and the anti-cancer therapy within about 12 to 24 or 72 h of each other and, more particularly, within about 6-12 h of each other. In some situations it may be desirable to extend the time period for treatment significantly where several days (2, 3, 4, 5, 6, or 7) to several weeks (1, 2, 3, 4, 5, 6, 7, or 8) lapse between respective administrations.

[0607] Various combinations may be employed. For the example below a genetically engineered immune cell is “A” and an anti-cancer therapy is “B”: A/B/A B/A/B B/B/A A/A/B A/B/B B/A/A A/B/B/B B/A/B/B B/B/B/A B/B/A/B A/A/B/B A/B/A/B A/B/B/A B/B/A/A B/A/B/A B/A/A/B A/A/A/B B/A/A/A A/B/A/A A/A/B/A

[0608] Administration of any compound, therapy, or genetically engineered immune cell of the present embodiments to a patient will follow general protocols for the administration of such compounds, therapies, and immune cells taking into account the toxicity, if any, of the agents. Therefore, in some embodiments there is a step of monitoring toxicity that is attributable to combination therapy.

[0609] A. Chemotherapy

[0610] A wide variety of chemotherapeutic agents may be used in accordance with the present embodiments. The term “chemotherapy” refers to the use of drugs to treat cancer. A “chemotherapeutic agent” is used to connote a compound or composition that is administered in the treatment of cancer. These agents or drugs are categorized by their mode of activity within a cell, for example, whether and at what stage they affect the cell cycle. Alternatively, an agent may be characterized based on its ability to directly cross-link DNA, to intercalate into DNA, or to induce chromosomal and mitotic aberrations by affecting nucleic acid synthesis.

[0611] Examples of chemotherapeutic agents include alkylating agents, such as thiotepa and cyclophosphamide; alkyl sulfonates, such as busulfan, improsulfan, and piposulfan; aziridines, such as benzodopa, carboquone, meturedopa, and uredopa; ethylenimines and methylamelamines, including altretamine, triethylenemelamine, trietylenephosphoramide, triethiylenethiophosphoramide, and trimethylolomelamine; acetogenins (especially bullatacin and bullatacinone); a camptothecin (including the synthetic analogue topotecan); bryostatin; callystatin; CC-1065 (including its adozelesin, carzelesin and bizelesin synthetic analogues); cryptophycins (particularly cryptophycin 1 and cryptophycin 8); dolastatin; duocarmycin (including the synthetic analogues, KW-2189 and CB1-TM1); eleutherobin; pancratistatin; a sarcodictyin; spongistatin; nitrogen mustards, such as chlorambucil, chlornaphazine, cholophosphamide, estramustine, ifosfamide, mechlorethamine, mechlorethamine oxide hydrochloride, melphalan, novembichin, phenesterine, prednimustine, trofosfamide, and uracil mustard; nitrosureas, such as carmustine, chlorozotocin, fotemustine, lomustine, nimustine, and ranimnustine; antibiotics, such as the enediyne antibiotics (e.g., calicheamicin, especially calicheamicin gammall and calicheamicin omegall); dynemicin, including dynemicin A; bisphosphonates, such as clodronate; an esperamicin; as well as neocarzinostatin chromophore and related chromoprotein enediyne antiobiotic chromophores, aclacinomysins, actinomycin, authrarnycin, azaserine, bleomycins, cactinomycin, carabicin, carminomycin, carzinophilin, chromomycinis, dactinomycin, daunorubicin, detorubicin, 6-diazo-5-oxo-L-norleucine, doxorubicin (including morpholino-doxorubicin, cyanomorpholino-doxorubicin, 2-pyrrolino-doxorubicin and deoxy doxorubicin), epirubicin, esorubicin, idarubicin, marcellomycin, mitomycins, such as mitomycin C, mycophenolic acid, nogalarnycin, olivomycins, peplomycin, potfiromycin, puromycin, quelamycin, rodorubicin, streptonigrin, streptozocin, tubercidin, ubenimex, zinostatin, and zorubicin; anti-metabolites, such as methotrexate and 5-fluorouracil (5-FU); folic acid analogues, such as denopterin, pteropterin, and trimetrexate; purine analogs, such as fludarabine, 6-mercaptopurine, thiamiprine, and thioguanine; pyrimidine analogs, such as ancitabine, azacitidine, 6-azauridine, carmofur, cytarabine, decitabine, dideoxyuridine, doxifluridine, enocitabine, and floxuridine; androgens, such as calusterone, dromostanolone propionate, epitiostanol, mepitiostane, and testolactone; anti-adrenals, such as mitotane and trilostane; folic acid replenisher, such as frolinic acid; aceglatone; aldophosphamide glycoside; aminolevulinic acid; eniluracil; amsacrine; bestrabucil; bisantrene; edatraxate; defofamine; demecolcine; diaziquone; elformithine; elliptinium acetate; an epothilone; etoglucid; gallium nitrate; hydroxyurea; lentinan; lonidainine; maytansinoids, such as maytansine and ansamitocins; mitoguazone; mitoxantrone; mopidanmol; nitraerine; pentostatin; phenamet; pirarubicin; losoxantrone; podophyllinic acid; 2-ethylhydrazide; procarbazine; PSKpolysaccharide complex; razoxane; rhizoxin; sizofiran; spirogermanium; tenuazonic acid; triaziquone; 2,2′,2″-trichlorotriethylamine; trichothecenes (especially T-2 toxin, verracurin A, roridin A and anguidine); urethan; vindesine; dacarbazine; mannomustine; mitobronitol; mitolactol; pipobroman; gacytosine; arabinoside (“Ara-C”); cyclophosphamide; taxoids, e.g., paclitaxel and docetaxel gemcitabine; 6-thioguanine; mercaptopurine; platinum coordination complexes, such as cisplatin, oxaliplatin, and carboplatin; vinblastine; platinum; etoposide (VP-16); ifosfamide; mitoxantrone; vincristine; vinorelbine; novantrone; teniposide; edatrexate; daunomycin; aminopterin; xeloda; ibandronate; irinotecan (e.g., CPT-11); topoisomerase inhibitor RFS 2000; difluorometlhylornithine (DMFO); retinoids, such as retinoic acid; capecitabine; carboplatin, procarbazine,plicomycin, gemcitabien, navelbine, farnesyl-protein tansferase inhibitors, transplatinum, and pharmaceutically acceptable salts, acids, or derivatives of any of the above. In some embodiments, azacitidine is administered at 75 mgs/m² subcutaneously.

[0612] B. Radiotherapy

[0613] Other factors that cause DNA damage and have been used extensively include what are commonly known as γ-rays, X-rays, and/or the directed delivery of radioisotopes to tumor cells. Other forms of DNA damaging factors are also contemplated, such as microwaves, proton beam irradiation (U.S. Pat. Nos. 5,760,395 and 4,870,287), and UV-irradiation. It is most likely that all of these factors affect a broad range of damage on DNA, on the precursors of DNA, on the replication and repair of DNA, and on the assembly and maintenance of chromosomes. Dosage ranges for X-rays range from daily doses of 50 to 200 roentgens for prolonged periods of time (3 to 4 wk), to single doses of 2000 to 6000 roentgens. Dosage ranges for radioisotopes vary widely, and depend on the half-life of the isotope, the strength and type of radiation emitted, and the uptake by the neoplastic cells.

[0614] C. Immunotherapy

[0615] The skilled artisan will understand that additional immunotherapies may be used in combination or in conjunction with methods of the embodiments. In the context of cancer treatment, immunotherapeutics, generally, rely on the use of immune effector cells and molecules to target and destroy cancer cells. Rituximab (RITUXAN) is such an example. The immune effector may be, for example, an antibody specific for some marker on the surface of a tumor cell. The antibody alone may serve as an effector of therapy or it may recruit other cells to actually affect cell killing. The antibody also may be conjugated to a drug or toxin (chemotherapeutic, radionuclide, ricin A chain, cholera toxin, pertussis toxin, etc.) and serve as a targeting agent. Alternatively, the effector may be a lymphocyte carrying a surface molecule that interacts, either directly or indirectly, with a tumor cell target. Various effector cells include cytotoxic T cells and NK cells.

[0616] In some embodiments, the additional immunotherapy for use in combination or in conjunction with the methods described herein is an antibody-drug conjugate (e.g., brentuximab vedotin (ADCETRIS) and trastuzumab emtansine or T-DM1 (KADCYLA).

[0617] In one aspect of immunotherapy, the tumor cell must bear some marker that is amenable to targeting, i.e., is not present on the majority of other cells. Many tumor markers exist and any of these may be suitable for targeting in the context of the present embodiments. Common tumor markers include CD20, carcinoembryonic antigen, tyrosinase (p9′7), gp68, TAG-72, HMFG, Sialyl Lewis Antigen, MucA, MucB, PLAP, laminin receptor, erb B, and p155. An alternative aspect of immunotherapy is to combine anticancer effects with immune stimulatory effects. Immune stimulating molecules also exist including: cytokines, such as IL-2, IL-4, IL-12, GM-CSF, gamma-IFN, chemokines, such as MIP-1, MCP-1, IL-8, and growth factors, such as FLT3 ligand.

[0618] In some embodiments, the additional immunotherapy for use in combination or in conjunction with the methods described herein is an immune adjuvant, e.g., Mycobacterium bovis, Plasmodium falciparum, dinitrochlorobenzene, and aromatic compounds (U.S. Pat. Nos. 5,801,005 and 5,739,169; Hui and Hashimoto, Infect. Immun. 66(11):5329-36, 1998; Christodoulides et al. Microbiology (Reading) 144 (Pt 11):3027-37, 1998); a cytokine therapy, e.g., interferons α, β, and γ, IL-1, GM-CSF, and TNF (Bukowski et al. Clin. Cancer Res. 4(10): 2337-47, 1998; Davidson et al. J Immunother. 21(5): 389-9, 1998; Hellstrand et al. Acta Oncol. 37(4): 347-53, 1998); a gene therapy, e.g., TNF, IL-1, IL-2, and p53 (Qin et al. Proc. Nat'l. Acad. Sci. USA 95(24):14411-6, 1998; Austin-Ward and Villaseca, Rev. Med. Chil. 126(7): 838-45, 1998; U.S. Pat. Nos. 5,830,880 and 5,846,945); and a monoclonal antibody(ies), e.g., anti-CD20, anti-ganglioside GM2, and anti-p185 (Hollander Front Immunol. 3:3, 2012; Hanibuchi et al. Int. J. Cancer 78(4):480-5, 1998; U.S. Pat. No. 5,824,311). It is contemplated that one or more anti-cancer therapies may be employed with the antibody therapies described herein.

[0619] In some embodiments, the immunotherapy for use in combination or in conjunction with the methods described herein may be an immune checkpoint inhibitor. Immune checkpoints either turn up a signal (e.g., co-stimulatory molecules) or turn down a signal. Inhibitory immune checkpoints that may be targeted by immune checkpoint blockade include adenosine A2A receptor (A2AR), B7-H3 (also known as CD276), B and T lymphocyte attenuator (BTLA), cytotoxic T-lymphocyte-associated protein 4 (CTLA-4, also known as CD152), indoleamine 2,3-dioxygenase (IDO), killer-cell immunoglobulin (KIR), lymphocyte activation gene-3 (LAG3), programmed death 1 (PD-1), T-cell immunoglobulin domain and mucin domain 3 (TIM-3) and V-domain Ig suppressor of T cell activation (VISTA). In particular, the immune checkpoint inhibitors target the PD-1 axis and/or CTLA-4.

[0620] The immune checkpoint inhibitors may be drugs such as small molecules, recombinant forms of ligand or receptors, or, in particular, are antibodies, such as human antibodies (e.g., International Patent Publication WO 2015/016718; Pardoll Nat. Rev. Cancer 12(4):252-64, 2012; both incorporated herein by reference). Known inhibitors of the immune checkpoint proteins or analogs thereof may be used, in particular chimerized, humanized or human forms of antibodies may be used (e.g., pembrolizumab). As the skilled person will know, alternative and/or equivalent names may be in use for certain antibodies mentioned in the present disclosure. Such alternative and/or equivalent names are interchangeable in the context of the present disclosure. For example, it is known that lambrolizumab is also known under the alternative and equivalent names MK-3475 and pembrolizumab.

[0621] In some embodiments, the PD-1 binding antagonist is a molecule that inhibits the binding of PD-1 to its ligand binding partners. In a specific aspect, the PD-1 ligand binding partners are PDL1 and/or PDL2. In another embodiment, a PDL1 binding antagonist is a molecule that inhibits the binding of PDL1 to its binding partners. In a specific aspect, PDL1 binding partners are PD-1 and/or B7-1. In another embodiment, the PDL2 binding antagonist is a molecule that inhibits the binding of PDL2 to its binding partners. In a specific aspect, a PDL2 binding partner is PD-1. The antagonist may be an antibody, an antigen binding fragment thereof, an immunoadhesin, a fusion protein, or oligopeptide. Exemplary antibodies are described in U.S. Pat. Nos. 8,735,553, 8,354,509, and 8,008,449, all incorporated herein by reference. Other PD-1 axis antagonists for use in the methods provided herein are known in the art such as described in U.S. Patent Application No. 2014/0294898, 2014/022021, and 2011/0008369, all incorporated herein by reference.

[0622] In some embodiments, the PD-1 binding antagonist is an anti-PD-1 antibody (e.g., a human antibody, a humanized antibody, or a chimeric antibody). In some embodiments, the anti-PD-1 antibody is selected from the group consisting of nivolumab, pembrolizumab, and CT-011. In some embodiments, the PD-1 binding antagonist is an immunoadhesin (e.g., an immunoadhesin comprising an extracellular or PD-1 binding portion of PDLL or PDL2 fused to a constant region (e.g., an Fc region of an immunoglobulin sequence). In some embodiments, the PD-1 binding antagonist is AMP-224. Nivolumab, also known as MDX-1106-04, MDX-1106, ONO-4538, BMS-936558, and OPDIVO®, is an anti-PD-1 antibody described in WO 2006/121168. Pembrolizumab, also known as MK-3475, Merck 3475, lambrolizumab, KEYTRUDA®, and SCH-900475, is an anti-PD-1 antibody described in WO 2009/114335. CT-011, also known as hBAT or hBAT-1, is an anti-PD-1 antibody described in WO 2009/101611. AMP-224, also known as B7-DCIg, is a PDL2-Fc fusion soluble receptor described in WO 2010/027827 and WO 2011/066342.

[0623] Another immune checkpoint that can be targeted in the methods provided herein is the cytotoxic T-lymphocyte-associated protein 4 (CTLA-4), also known as CD 152. The complete cDNA sequence of human CTLA-4 has the GENBANK accession number L15006. CTLA-4 is found on the surface of T cells and acts as an “off switch when bound to CD80 or CD86 on the surface of antigen-presenting cells. CTLA4 is a member of the immunoglobulin superfamily that is expressed on the surface of Helper T cells and transmits an inhibitory signal to T cells. CTLA4 is similar to the T-cell co-stimulatory protein, CD28, and both molecules bind to CD80 and CD86, also called B7-1 and B7-2 respectively, on antigen-presenting cells. CTLA4 transmits an inhibitory signal to T cells, whereas CD28 transmits a stimulatory signal. Intracellular CTLA4 is also found in regulatory T cells and may be important to their function. T cell activation through the T cell receptor and CD28 leads to increased expression of CTLA-4, an inhibitory receptor for B7 molecules.

[0624] In some embodiments, the immune checkpoint inhibitor is an anti-CTLA-4 antibody (e.g., a human antibody, a humanized antibody, or a chimeric antibody), an antigen binding fragment thereof, an immunoadhesin, a fusion protein, or oligopeptide.

[0625] Anti-human-CTLA-4 antibodies (or VH and/or VL domains derived therefrom) suitable for use in the present methods can be generated using methods well known in the art. Alternatively, art recognized anti-CTLA-4 antibodies can be used. For example, the anti-CTLA-4 antibodies disclosed in: U.S. Pat. No. 8,119,129, WO 01/14424, WO 98/42752; WO 00/37504 (CP675,206, also known as tremelimumab; formerly ticilimumab), U.S. Pat. No. 6,207,156; Hurwitz et al., Proc. Natl. Acad. Sci. U.S.A. 95(17):10067-10071, 1998; Camacho et al., Clin. Oncology 22(145): Abstract No. 2505 (antibody CP-675206), 2004; and Mokyr et al., Cancer Res. 58:5301-5304, 1998 can be used in the methods disclosed herein. The teachings of each of the aforementioned publications are hereby incorporated by reference. Antibodies that compete with any of these art-recognized antibodies for binding to CTLA-4 also can be used. For example, a humanized CTLA-4 antibody is described in International Patent Application No. WO 2001/014424, WO 2000/037504, and U.S. Pat. No. 8,017,114; all incorporated herein by reference.

[0626] An exemplary anti-CTLA-4 antibody is ipilimumab (also known as 10D1, MDX-010, MDX-101, and Yervoy®) or antigen binding fragments and variants thereof (see, e.g., WO 01/14424). In other embodiments, the antibody comprises the heavy and light chain CDRs or VRs of ipilimumab. Accordingly, in some embodiments, the antibody comprises the CDR1, CDR2, and CDR3 domains of the VH region of ipilimumab, and the CDR1, CDR2 and CDR3 domains of the VL region of ipilimumab. In another embodiment, the antibody competes for binding with and/or binds to the same epitope on CTLA-4 as the above-mentioned antibodies. In another embodiment, the antibody has at least about 90% variable region amino acid sequence identity with the above-mentioned antibodies (e.g., at least about 90%, 95%, or 99% variable region identity with ipilimumab).

[0627] Other molecules for modulating CTLA-4 include CTLA-4 ligands and receptors such as described in U.S. Pat. Nos. 5,844,905, 5,885,796 and International Patent Application Nos. WO 1995001994 and WO 1998/042752; all incorporated herein by reference, and immunoadhesins such as described in U.S. Pat. No. 8,329,867, incorporated herein by reference.

[0628] Examples of immunotherapies for use in treatment of kidney cancer or renal cell cancer include, but are not limited to Afinitor (Everolimus), Afinitor Disperz (Everolimus), Aldesleukin, Avastin (Bevacizumab), Avelumab, Axitinib, Bavencio (Avelumab), Bevacizumab, Cabometyx (Cabozantinib-S-Malate), Cabozantinib-S-Malate, Everolimus, IL-2 (Aldesleukin), Inlyta (Axitinib), Interleukin-2 (Aldesleukin), Ipilimumab, Keytruda (Pembrolizumab), Lenvatinib Mesylate, Lenvima (Lenvatinib Mesylate), Mvasi (Bevacizumab), Nexavar (Sorafenib Tosylate), Nivolumab, Opdivo (Nivolumab), Pazopanib, Hydrochloride, Pembrolizumab, Proleukin (Aldesleukin), Sorafenib Tosylate, Sunitinib Malate, Sutent (Sunitinib Malate), Temsirolimus, Torisel (Temsirolimus), Votrient (Pazopanib Hydrochloride), Yervoy (Ipilimumab).

[0629] Examples of immunotherapies for use in treatment of Acute Myeloid Leukemia (AML) include, but are not limited to Azacitidine, Arsenic Trioxide, Cerubidine (Daunorubicin Hydrochloride), Cyclophosphamide, Cytarabine, Daunorubicin Hydrochloride, Daunorubicin Hydrochloride and Cytarabine Liposome, Daurismo (Glasdegib Maleate), Dexamethasone, Doxorubicin Hydrochloride, Enasidenib Mesylate, Gemtuzumab Ozogamicin, Gilteritinib Fumarate, Glasdegib Maleate, Idamycin PFS (Idarubicin Hydrochloride), Idarubicin Hydrochloride, Idhifa (Enasidenib Mesylate), Ivosidenib, Midostaurin, Mitoxantrone Hydrochloride, Mylotarg (Gemtuzumab Ozogamicin), Rubidomycin (Daunorubicin Hydrochloride), Rydapt (Midostaurin), Tabloid (Thioguanine), Thioguanine, Tibsovo (Ivosidenib), Trisenox (Arsenic Trioxide), Venclexta (Venetoclax), Venetoclax, Vincristine Sulfate, Vyxeos (Daunorubicin Hydrochloride and Cytarabine Liposome), Xospata (Gilteritinib Fumarate).

### 3. Surgery

[0630] Approximately 60% of persons with cancer will undergo surgery of some type, which includes preventative, diagnostic or staging, curative, and palliative surgery. Curative surgery includes resection in which all or part of cancerous tissue is physically removed, excised, and/or destroyed and may be used in conjunction with other therapies, such as the treatment of the present embodiments, chemotherapy, radiotherapy, hormonal therapy, gene therapy, immunotherapy, and/or alternative therapies. Tumor resection refers to physical removal of at least part of a tumor. In addition to tumor resection, treatment by surgery includes laser surgery, cryosurgery, electrosurgery, and microscopically-controlled surgery (Mohs' surgery).

[0631] Upon excision of part or all of cancerous cells, tissue, or tumor, a cavity may be formed in the body. Treatment may be accomplished by perfusion, direct injection, or local application of the area with an additional anti-cancer therapy. Such treatment may be repeated, for example, every 1, 2, 3, 4, 5, 6, or 7 days, or every 1, 2, 3, 4, and 5 weeks or every 1, 2, 3, 4, 5, 6, 7, 8, 9, 10, 11, or 12 months. These treatments may be of varying dosages as well.

### 4. Other Agents

[0632] It is contemplated that other agents may be used in combination with certain aspects of the present embodiments to improve the therapeutic efficacy of treatment. These additional agents include agents that affect the upregulation of cell surface receptors and GAP junctions, cytostatic and differentiation agents, inhibitors of cell adhesion, agents that increase the sensitivity of the hyperproliferative cells to apoptotic inducers, or other biological agents. Increases in intercellular signaling by elevating the number of GAP junctions would increase the anti-hyperproliferative effects on the neighboring hyperproliferative cell population. In other embodiments, cytostatic or differentiation agents can be used in combination with certain aspects of the present embodiments to improve the anti-hyperproliferative efficacy of the treatments. Inhibitors of cell adhesion are contemplated to improve the efficacy of the present embodiments. Examples of cell adhesion inhibitors are focal adhesion kinase (FAKs) inhibitors and Lovastatin. It is further contemplated that other agents that increase the sensitivity of a hyperproliferative cell to apoptosis, such as the antibody c225, could be used in combination with certain aspects of the present embodiments to improve the treatment efficacy.

### V. Dosage Regimens

[0633] In some embodiment, the genetically engineered immune cells (e.g., genetically engineered NK cells) are modified by engineering (e.g., genetically modified) to introduce a chimeric antigen receptor (e.g., anti-CD70 CAR) and a cytokine (e.g., IL-15 or a mbIL-15/IL-15RA complex) (or nucleic acids encoding these proteins) into the cells and then rapidly infused into a subject. In some embodiments, immune effector cells are modified by engineering/introducing a chimeric receptor, and functional effector element and/or and a cytokine into the cells and then infused within about 0 days, within about 1 day, within about 2 days, within about 3 days, within about 4 days, within about 5 days, within about 6 days or within about 7 days into a subject.

[0634] In some embodiments, an amount of genetically engineered immune cellsis administered to a subject in need thereof and the amount is determined based on the efficacy and the potential of inducing a cytokine-associated toxicity. In another embodiment, the cells are CAR′ and CD56⁺ cells. In some embodiments, an amount of the cells comprises about 10⁴ to about 10⁹ cells/kg. In some cases, an amount of cells comprises about 10⁴ to about 10⁵ cells/kg. In some cases, an amount of cells comprises about 10⁵ to about 10⁶ cells/kg. In some cases, an amount of genetically engineered immune cells comprises about 10⁶ to about 10′ cells/kg. In some cases, an amount of genetically engineered immune cells comprises about 10′ to about 10⁸ cells/kg. In some cases, an amount of genetically engineered immune cells comprises about 10⁸ to about 10⁹ cells/kg. In some cases, am amount of genetically engineered immune cells comprises about 1×10⁶, about 2×10⁶, about 3×10⁶, about 4×10⁶, about 5×10⁶, about 6×10⁶, about 7×10⁶, about 8×10⁶, about 9×10⁶, about 1×10⁷, about 2×10⁷, about 3×10⁷, about 4×10⁷, about 5×10⁷, about 6×10⁷, about 7×10⁷, about 8×10⁷, about 9×10⁷, about 1×10⁸, about 2×10⁸, about 3×10⁸, about 4×10⁸, about 5×10⁸, about 6×10⁸, about 7×10⁸, about 8×10⁸, about 9×10⁸, or about 1×10⁹ cells/kg.

[0635] In some embodiments, the genetically engineered immune cells are targeted to the cancer via regional delivery directly to the tumor tissue. For example, in ovarian or renal cancer, the genetically engineered immune cells can be delivered intraperitoneally (IP) to the abdomen or peritoneal cavity. Such IP delivery can be performed via a port or pre-existing port placed for delivery of chemotherapy drugs. Other methods of regional delivery of genetically engineered immune cells can include catheter infusion into resection cavity, ultrasound guided intratumoral injection, hepatic artery infusion or intrapleural delivery.

[0636] In some embodiments, a subject in need thereof, can begin therapy with a first dose of genetically engineered immune cells delivered via IV followed by a second dose of genetically engineered immune cells delivered via IV. In some embodiments, a subject in need thereof, can begin therapy with a first dose of genetically engineered immune cells delivered via IP followed by a second dose of genetically engineered immune cells delivered via IV. In a further embodiment, the second dose of genetically engineered immune cells can be followed by subsequent doses which can be delivered via IV or IP. In some embodiments, the duration between the first and second or further subsequent dose can be about: 0, 1, 2, 3, 4, 5, 6, 7, 8, 9, 10, 11, 12, 13, 14, 15, 16, 17, 18, 19, 20, 21, 22, 23, 24, 25, 26, 27, 28, 29, 30 days. In some embodiments, the duration between the first and second or further subsequent dose can be about: 0, 1, 2, 3, 4, 5, 6, 7, 8, 9, 10, 11, 12, 13, 14, 15, 16, 17, 18, 19, 20, 21, 22, 23, 24, 25, 26, 27, 28, 29, 30, 31, 32, 33, 34, 35, or 36 months. In some embodiments, the duration between the first and second or further subsequent dose can be about: 0, 1, 2, 3, 4, 5, 6, 7, 8, 9 or 10 years.

[0637] In another embodiment, a catheter can be placed at the tumor or metastasis site for further administration of 1, 2, 3, 4, 5, 6, 7, 8, 9, 10 doses of genetically engineered immune cells. In some cases, doses of genetically engineered immune cells can comprise about 10² to about 10⁹ cells/kg. In cases where toxicity is observed, doses of genetically engineered immune cells can comprise about 10² to about 10⁵ cells/kg. In some cases, doses of genetically engineered immune cells can start at about 10² cells/kg and subsequent doses can be increased to about: 10⁴, 10⁵, 10⁶, 10⁷, 10⁸ or 10⁹ cells/kg.

### VI. Articles of Manufacture or Kits

[0638] An article of manufacture or a kit is provided comprising genetically engineered immune cells is also provided herein. The article of manufacture or kit can further comprise a package insert comprising instructions for using the genetically engineered immune cells to treat or delay progression of cancer in an individual or to enhance immune function of an individual having cancer. Any of the genetically engineered immune cells described herein may be included in the article of manufacture or kits. Suitable containers include, for example, bottles, vials, bags and syringes. The container may be formed from a variety of materials such as glass, plastic (such as polyvinyl chloride or poly olefin), or metal alloy (such as stainless steel or hastelloy). In some embodiments, the container holds the formulation and the label on, or associated with, the container may indicate directions for use. The article of manufacture or kit may further include other materials desirable from a commercial and user standpoint, including other buffers, diluents, filters, needles, syringes, and package inserts with instructions for use. In some embodiments, the article of manufacture further includes one or more of another agent (e.g., a chemotherapeutic agent, and anti-neoplastic agent). Suitable containers for the one or more agent include, for example, bottles, vials, bags and syringes.

### EXAMPLES

### Example 1—Methods of Modifying NK Cells to Express Cars Comprising CD70 Binding Sequences

[0639] NK Cell Derivation from CAR-Expressing iPSCs

[0640] The derivation of NK cells from iPSCs and CAR transfected iPSCs have been previously described (Knorr et al., 2013 (supra); Ng et al. Nat Protoc. 3:768-76, 2008). Briefly, 3,000 TrypLE-adapted iPSCs are seeded in 96-well round-bottom plates with APEL culture (Ng et al., 2008, supra) containing 40 ng/ml human Stem Cell Factor (SCF), 20 ng/ml human Vascular Endothelial Growth Factor (VEGF), and 20 ng/ml recombinant human Bone Morphogenetic Protein 4 (BMP-4). After day 11 of hematopoietic differentiation, spin embryoid bodies (EBs) are then directly transferred into each well of uncoated 24-well plates under a condition of NK cell culture. Cells are then further differentiated into NK cells as previously reported (Bachanova et al. Blood 123(25): 3855-63 2014; Ni et al. Methods Mol. Biol. 1029: 33-41 2013) using 5 ng/mL IL-3 (first week only), 10 ng/mL IL-15, 20 ng/mL IL-7, 20 ng/mL SCF, and 10 ng/mL flt3 ligand for 28-32 days. Half-media changes are performed weekly. NK cells are harvested for irradiated mbIL-21 expressing artificial antigen presenting cells (aAPCs) expansion (Denman et al. PLoS One 7(1):e30264, 2012) with 50 units/mL of hIL-2.

### Molecular Constructs

[0641] TcBuster Transposon vectors are designed and reconstructed as previously described. Transgene expression is driven by the mCAG promoter. CARs constructs are designed to bind specifically to CD70. FIG. 1 shows a schematic diagram of the structure of each anti-CD70 CAR tested. Membrane bound IL-15, co-expressed IL-15/IL-15RA polypeptides and membrane bound IL-12 polypeptides are also constructed (FIGS. 2 and 3). CARs and mbIL-15 and mbIL-12 are synthesized as gBlocks gene fragment and cloned into the transposon using restriction enzyme cloning and ligation. Correct CAR sequences are confirmed by restriction enzyme digest and sequencing analyses. Insulated TcBuster vectors are generated by PCR of CAR expression cassettes from TcBuster transposon vectors and subsequent BP Clonase reaction into pDONR221 to generate pENTR221-CAR cassette plasmids. pENTR221-CAR cassette plasmids are subsequently used for LR Clonase reaction into PB-I-DEST-I to generate final TcBuster expression vectors. The PB-I-DEST-I vector contains a 2.4 kb cHS4 insulator (I) flanking the Gateway destination cassette (DEST) used for LR clonase cloning. Generation of stable clone of CAR transfected NK cells are performed as described above. To determine the copy numbers of integrated vector, genomic DNA is isolated from the iPSCs and NK92 cells and performed quantitative PCR using sets of primers specific for GFP:zeo region of vector and for the human RNase gene. To determine absolute value, a standard curve is generated using serial dilutions of a plasmid containing GFP:zeo region. Reactions are carried out in triplicate in CFX384 Touch™ Real-Time PCR Detection System.

[0642] Nucleic acids/DNA/genes encoding the constructs are cloned into the multiple cloning site of retroviral gene transfer vectors: pELNS or pES.12-6(g)ps under control of one of the following promoters: EF-1, EF1a, EFS, MND, MSCV, CMV, PGK or RPBSA. Retrovirus is produced in 293T cells by transfecting the cells with gene transfer vectors. Cells are placed in fresh culturing medium. The virus supernatant is collected 48-72 hours post-medium change by centrifugation at 800×g for 5 minutes. The supernatant is collected, filtered, and frozen in aliquots at −80° C.

### Quantitative RT-PCR

[0643] To test the level of chimeric antigen receptor transcript expression in genetically engineered NK cells, RNA are processed from NK cells at harvest. For cell cycle gene analysis, transcripts are evaluated using the Human Cell Cycle RT² Profiler PCR Array (Qiagen). CPT1a, SOCS1, SOCS2, and SOCS3 transcripts are analyzed and normalized to GAPDH.

### Immunoblot

[0644] To test the chimeric antigen receptor expression in genetically engineered NK cells, suspension cells are lysed in RIPA lysis buffer with fresh protease inhibitor cocktail on ice for 20 min and sonicated for 2 seconds on ice. Membrane proteins are extracted using a Membrane Protein Extraction Kit. Sample proteins are measured by a standard bicinchoninic acid assay, size fractioned by polyacrylamide gel electrophoresis (PAGE), and are transferred to nitrocellulose membrane. Nonspecific binding are blocked by incubating in TBST 5% BSA plus 1% Triton X-100 solution for 1 hours, followed by incubation with primary antibodies, overnight at 4° C. Species specific IRDye-conjugated secondary antibodies (1:10,000) are applied to membranes for 1 hour at room temperature. Immunoreactive products are visualized in Odyssey Imaging Systems. All loading samples are normalized by staining of GAPDH.

### Proliferation Assays

[0645] To test the proliferation and viability of NK cells, genetically engineered NK cells or NK cells from healthy donors are labeled with Cell Proliferation Dye and placed in the continuous IL-15 treatment (IL-15cont) or intermittent IL-15 treatment (IL-15gap) conditions for 9 days (e.g., as described in Felices et al. (2018) JCI Insight 3(3): e96219). In the IL-15cont treatment, cells are cultured in media supplemented IL-15 during 3 consecutive 3-day cycles. In the IL-15gap treatment, cells are cultured in media for an initial 3-day cycle in media supplemented with IL-15, in media without IL-15 for a 3-day cycle, and subsequently in media supplemented with IL-15 for a 3-day cycle. Viable NK cells (CD56⁺CD3⁻) are then analyzed for dilution of dye.

### Cell Lysis Assay

[0646] To test the ability of the genetically engineered NK cells to specifically target cells for lysis, human AML cell lines are incubated with ⁵¹chromium (⁵¹Cr) or europium for 1 hour at 37° C., washed three times, and cocultured with NK cells at the indicated effector to target (E:T) ratios. Total lysis (test release) is achieved with the use of 5% Triton-X 100. After a period of incubation, cells are harvested and analyzed. Specific ⁵¹/Cr or europium/lysis is determined following the equation: Percentage of specific lysis=100×(Test release−Spontaneous release)/(Maximal release−Spontaneous release).

### CD107a (LAMP1) Expression and IFN-γ Staining

[0647] CD107a (LAMP1) expression and IFN-γ production by target cells are two proxys for the level of NK cell binding with said cells. NK cells are incubated with or without cancer target cell lines (K562 cells, K562meso cells, MA148, cells, or A1847 cells) at 1:2 effector to target ratios. CD107a-APC antibody is added to each well and allowed to incubate for 1 hour, and subsequently GolgiStop and GolgiPlug is added for an additional 2-hour incubation. At the completion of incubation, cells are washed with FACS buffer and are stained with CD56-PE and LIVE/DEAD Fixable Aqua Sstain (ThermoFisher Scientific). Cells are then fixed with fixation buffer for 10 minutes on ice, following by permeabilization with permeabilization/wash buffer for 10 minutes at 4° C. Cells are washed and stained with interferon-γ (IFN-γ)-Pacific Blue for 30 minutes at 4° C., and then final washed for analysis. CD107a expression and intracellular IFN-γ production are evaluated by normalization data of NK cell without target cell co-culture.

### Metabolic Studies

[0648] CAR+NK cells are harvested at day 9 of culture and resuspended in Seahorse XF Assay Medium (Agilent Technologies). One million cells/well are immobilized with Poly-L-Lysine (MilliporeSigma). The extracellular acidification rate and the oxygen consumption rate are measured (pmoles/min) in real time in an XFe24 analyzer after injection of glucose (10 mM), oligomycin (1 μM), FCCP (1 μM) plus sodium pyruvate (1 mM), and rotenone/antimycin A (0.5 μM). SRC is calculated from the change from basal oxygen consumption, after addition of glucose, to maximal oxygen consumption, after addition of FCCP. In experiments measuring the input of FAO, glucose is added to the media prior to beginning measurements. This is the followed by injection of the CPT-1 inhibitor etomoxir, injection of oligomycin, injection of FCCP plus sodium pyruvate, and final injection of rotenone/antimycin A.

AML Xenografts with NK Cell Treatment

[0649] AML cancer cells are incorporated into a previously described NK cell xenogeneic mouse model system (Hermanson et al. Stem Cells 34(1):93-101, 2016). NOD-scid IL2rγ null (NSG, n=5/group) mice are obtained from Jackson Laboratories for all in vivo experiments. Human leukemia cell lines include Kasumi-1 (Asou et al. Blood 77(9):2031-6 1991), HL-60 (Gallagher et al. Blood 54(3): 713-33, 1979), PL-21 (Kubonishi et al. Blood 63(2):254-9. 1984), NB4 (Lanotte et al. Blood 77(5): 1080-6 1991), HT-93 (Kishi et al. Exp. Hematol. 26(2):135-42, 1998), U-937 (Sundstrom and Nilsson, Int. J Cancer 17(5):565-771976), MV4-11 (Lange et al. Blood 70: 192-9, 1987), MOLM-13 (Matsuo et al. Leukemia 11(9):1469-77 1997), NOMO-1 (Kato et al. Acta Haematol Jpn. 49:277, 1986), KG-1 (Koeffler and Golde Science 200:1153-4, 1978), and HEL (Martin and Papayannopoulou, Science 216(4551):1233-5, 1982). Mice are given 2×10⁵ of luciferase expressing cancer cells intraperitoneally (I.P.) 4 days prior to NK cell infusion (Day −4). On Day −1 mice are conditioned with 225 cGy, and bioluminescent imaging (BLI) is used to normalize tumor engraftment burden in each group. 1.5×10⁷ or 1.0×10⁷ cells per mouse NK cells or T cells are then given intraperitoneally on Day 0. Cytokine administration of hIL-2 (10,000 unit/mouse, every 2-3 day for 21 days) and hIL-15 (10 ng/mouse for 7 days) is initiated on mice under NK cell therapy after day 1. Tumor aggressiveness is determined by BLI weekly using the Xenogen IVIS Imaging system.

### In Vivo Mouse Study and Imaging

[0650] NOD/SCID/γc−/− (NSG) mice (Jackson Labs) are sublethally irradiated (275 cGy) and xenografted i.v. with 750,000 firefly luciferase-expressing human leukemia cell lines (e.g., HL-60 human acute promyelocytic leukemia cells) (day −3). At day 0, mice are given i.v. 1×10⁶ IL-15cont or IL-15gap NK cells; they are harvested at day 9 of culture. 2 μg IL-15 (NCI) is injected i.p. per mouse on that day and every 7 days following to induce basal maintenance of the NK cells. Retro orbital bleeds, 150 μl, are carried out at day 6, 13, and 20 to assess human cell content. Mice are injected with 100 μl of 30 mg/mL luciferin substrate 10 minutes prior to imaging and then anesthetized via inhalation of isoflurane gas. Assessment of the presence of tumor cells by bioluminescent imaging (BLI) is carried out at day 14 using the Xenogen IVIS imaging system and analyzed with Living Image 2.5 software (Caliper Life Science).

### Example 2—Genetically-Engineered Car NK Cells Derived from Peripheral Blood or Cord Blood NK Cells

[0651] Isolation of NK Cells from Peripheral Blood or Cord Blood

[0652] NK cells are isolated from either human peripheral blood leukapheresis samples or cord blood units. Briefly, leukapheresis samples or cord blood units are enriched for peripheral blood mononuclear cells (PBMCs). One method for PBMC enrichment is separation using a Ficoll density gradient. Next, peripheral blood NK cells are isolated from PBMC samples using immunomagnetic separation beads. Beads are conjugated to a cocktail of specific immunophenotypic antibodies to enable NK cell isolation through either positive or negative selection. Isolated NK cells are activated prior to transduction. One method for NK cell activation is co-culture with irradiated artificial antigen presenting cells (aAPCs) expressing mbIL-21 and 4-1BBL for expansion in the presence of hIL-2.

### Molecular Constructs

[0653] For viral-based cell engineering CD70 CAR constructs described in FIG. 1 are cloned into the multiple cloning site of retroviral gene transfer vectors: pELNS or pES.12-6(g)ps under control of one of the following promoters: EF-1, EF1a, EFS, MND, MSCV, CMV, PGK, mCAG or RPBSA. Retrovirus is produced in 293T cells by transfecting the cells with gene transfer vectors. Cells are placed in fresh culturing medium. The virus supernatant is collected 48-72 hours post-medium change by centrifugation at 800×g for 5 minutes. The supernatant is collected, filtered, and frozen in aliquots at −80° C. Non-viral gene delivery system is based on TcBuster Transposon. Transgene expression is driven by one of the following promoters: EF-1, EF1a, EFS, MND, MSCV, CMV, PGK, mCAG or RPBSA. CD70 CAR constructs are cloned into transposon vectors using SpeI/NheI restriction sites. Transposon DNA and mRNA encoding TcBuster transposase are co-delivered into NK cells via electroporation with MaxCyte or Neon machine. Successful integration and expression efficiency are assessed post transduction by flow cytometry to characterize CAR expression.

### Cell Lysis Assay

[0654] Genetically modified peripheral blood NK cells are then assessed for functionality in cell killing assays. One method to test the ability of the modified NK cells to specifically target cells for lysis is co-culture with human AML or other CD70-positive tumor cell lines expressing luciferase. Cell killing is characterized across a range of effector to target ratios (E:T). As a negative control, luciferase expressing cell lines are cultured with unmodified NK cells or NK cells expressing a non-targeting construct. An additional control is culture of luciferase expressing cell lines in the absence of NK cells. After a period of co-culture, luciferase signal is analyzed and compared to control samples. Target cell killing is observed as the decrease in luciferase signal in target cells relative to controls. Alternatively, target cell killing is observed as the release of luciferase into cell culture media.

### CD107a and Cytokine Expression

[0655] CD107a expression and cytokines such as IFNγ and TNFα by NK are assessed to characterize functionality. Genetically modified NK cells are co-cultured with human AML, or other CD70-positive tumor cell lines across a range of E:T ratios for a period of time. Cell surface expression of CD107a is assessed by flow cytometry with a CD107a-specific antibody. Cytokine expression is assessed by intracellular cytokine staining. Briefly, samples are treated with a protein transport inhibitor such as GolgiStop for a period of time. Next, samples are treated with a fixation/permeabolization solution, stained with cytokine-specific antibodies, and assessed by flow cytometry. Alternatively, cytokine secretion into cell culture can be measured through multiplex ELISA. CD107a and cytokine expression are evaluated relative to controls including unmodified NK cells, NK cells expressing a non-targeting construct, and modified NK cells in the absence of target cells.

### Proliferation Assays

[0656] Proliferation of modified NK cells is assessed following co-culture with human AML or other CD70-positive tumor cell lines for a period of time. One method is covalent labeling of viable NK cells with a cell proliferation dye such as CFSE, where proliferation corresponds to dilution of dye. Alternatively, proliferation of modified NK cells is assessed by flow cytometry to determine NK cell counts. NK cells are labeled with NK-specific phenotypic markers and are negative for other lineage phenotypic markers. For both methods, proliferation of modified NK cells is compared to controls including unmodified NK cells, NK cells expressing a non-targeting construct, and modified NK cells in the absence of target cells.

### Example 4—CD70 Knockout NK Cells Exhibit Increased Expansion and Viability and NK Knockout Enables the Generation of Anti-CD70 CARs in NK Cells

### Activation of NK Cells Induces a Significant Increase in CD70 Expression

[0657] Peripheral blood NK cells were isolated from human leukapheresis samples utilizing magnetic isolation. NK cells were then negatively selected from PBMC samples using immunomagnetic separation beads. Isolated NK cells were cultured with irradiated artificial antigen presenting cells (aAPCs) prior to transduction to enable NK cell activation and expansion in the presence of 100 IU/mL of recombinant IL-2. Following activation, the level of CD70 expression was assessed by flow cytometry 4 days and 7 days post-activation. As shown in FIG. 6, the expression of CD70 protein dramatically increases following activation.

### CD70 Knockout Improves NK Cell Expansion and Viability

[0658] Activated NK cells were harvested at Day 8 post-activation, resuspended at 5×10⁷ cells/ml in Resuspension Buffer T (Thermo Fisher) and incubated with a pre-formed CD70crRNA-Cas9 complex (Integrated DNA Technologies). Cells were electroporated with the Neon Transfection System (ThermoFisher Scientific) using 2 pulses at 2000V and 10 ms pulse width. NK cells were recovered in warm NK MACS media (Miltenyi Biotec) containing 500 IU/mL IL-2. 48 hours later, NK cells were transferred to a G-REX flask (Wilson Wolf) with 1:1 ratio of irradiated artificial antigen presenting cells (aAPCs) and cultured in AIM-V media supplemented with 100 IU IL-2/mL for 4 days. Knockout of CD70 was assessed by flow cytometry on an Attune N×T Flow Cytometer. As shown in FIG. 7, CD70 was efficiently knocked out from peripheral blood NK cells.

[0659] To examine the effect of CD70 knockout, 1×10⁶ of either wild-type or CD70 knock out NK cells were plated in a 24-well tissue culture plate in AIM-V media containing concentrated lentivirus particles. The cells were transduced to express either (a) a CAR comprising a CD27 extracellular domain, a CD27 transmembrane domain, a CD27 co-stimulatory domain, and a CD3z activation domain (Construct #1; SEQ ID NO: 643), (b) a CAR comprising an anti-CD70 scFv, a CD8α hinge, a CD8α transmembrane domain, a 4-1BB co-stimulatory domain, and a CD3z activation domain (Construct #2; SEQ ID NO: 2565), or (c) green fluorescent protein (GFP) ascontrol, untransduced cells were also used as control. Plates were spun at 1,000×g for 20 minutes at room temperature, and incubated at 37° C. 5% CO2 for 6 hours. Thereafter, the culture media was supplemented with IL-2 (100 IU/mL Bio-Techne) every other day. On Day 5 post-transduction, the cells were transferred to a 24 well G-REX plate (Wilson Wolf) and cultured for an additional 5 days in AIM-V media supplemented with IL-2. Cell counts and viability were assessed on Day 10 post-transduction utilizing acridine orange (AO)/propidium iodide (PI) staining on a Cellaca automated cell counter (Nexcelom Bioscience). Transduction efficiency was assessed by flow cytometry on Day 10 post-transduction. As shown in FIG. 8A, shows the expression of exemplary anti-CD70 CARs (i.e., Construct #1 or Construct #2) or GFP control was comparable between CD70 wild-type NK cells and CD70 knockout NK cells. Surprisingly, CD70 knockout NK cells expressing GFP exhibited greater cell expansion and viability as compared to CD70 wild-type NK cells expressing GFP (FIG. 8B and FIG. 8C). This effect was also observed in cells expressing each anti-CD70 CAR. The viability of CD70 wild-type NK cells expressing each CAR construct was less than or equal to 25% viable, while the viability of CD70 knockout NK cells expressing the same CAR constructs was above 85%. Additionally, CD70 wild-type NK cells expressing the GFP control were about 58% viable, while CD70 knockout NK cells expressing the same GFP control were about 90% viable (FIG. 8C).

[0660] Without wishing to be bound by theory, the observed difference in cell count among the NK cells expressing the CAR constructs may be due to reduced fratricide given that NK cells express high amounts of CD70 following activation.

### Effector NK Cells Expressing Anti-CD70 CARs Kill CD70 Wildtype NK Cells but not CD70 Knockout NK Cells

[0661] To determine whether NK cells expressing an anti-CD70 CAR construct were directly killing CD70-expressing NK cells, autologous CD70 wild-type (WT) NK cells and CD70 Knockout (KO) NK cells were labelled with CellTrace Violet dye (CTV) (ThermoFisher Scientific) and co-cultured at multiple effector to target cell (E/T) ratios with CD70 KO NK cells expressing either of the anti-CD70 CAR constructs (i.e., Construct #1 or Construct #2), or untransduced CD70 KO cells (UTD; asnegative control).

[0662] Briefly, the target cells were labelled with CTV according to the manufacturer's instructions, resuspended in media, and plated at 50,000 cells/well in a 96 well U-bottom plate (ThermoFisher Scientific). The effector cells (i.e., CD70 KO NK cells expressing either Construct #1 or Construct #2, or UTD control cells, were combined at E/T ratios of either 4:1, 2:1, 1:1, or 0.5:1. Cells were cultured for 4 hours at 37° C., 5% CO2, and stained with antibodies against CD56, CD16, and CD70. Remaining CTV+ target cells were enumerated by running a fixed volume of stained cells on an Attune N×T Flow Cytometer. The number of remaining CTV+ target cells per well was normalized against the number of CTV+ target cells in wells containing target cells only. As shown in FIG. 9A and FIG. 9B, increased target cell killing by effector CD70 knockout NK cells expressing either CAR was observed when target CD70 wild-type NK cells were used as compared to when target CD70 knockout NK cells were used indicating that NK cells expressing each CAR directly kill CD70-expressing NK cells.

### Effector NK Cells Expressing Anti-CD70 CARs are Capable of Killing the Target Acute Myeloid Leukemia MOLM-13 Cell Line in a CD70-Dependent Manner

[0663] To determine whether NK cells expressing an anti-CD70 CAR construct were capable of directly killing target tumor cells in a CD70-dependent manner, in vitro cytotoxicity assays were performed using the target tumor cell line MOM-13, an acute myeloid leukemia cell line modified to knock-out CD70. Briefly, MOLM-13 expressing luciferase and endogenous CD70 or MOLM-13 engineered to knockout CD70 and express luciferase were plated at 25,000 cells/well in a 96 well plate. Effector CD70 knockout NK cells expressing either of the anti-CD70 CAR constructs (i.e., Construct #1 or Construct #2), or untransduced NK cells (UTD NK; control) were co-cultured at either a 1:1 or 0.5 to 1 E/T ratio in a 37° C. 5% CO₂ incubator. After 4 hours, Steady-Glo Luciferase Assay Reagent (Promega) was added at a 1:1 volume to label, and the plates were placed on an orbital plate shaker rotating at 500 rpm for 5 minutes. Lysed cells were transferred to a black clear bottom plate, and the luciferase signal was determined on a GloMax Discover System plate reader (Promega). The percent killing activity was determined using the following formula:

$$( \frac{RLU ( target cells only ) - RLU ( target cells + NK cells )}{RLU ( target cells only )} ) * 100$$

[0664] As shown in FIG. 10, CD70 knockout NK cells expressing anti-CD70 CARs (i.e., Construct #1 or Construct #2) exhibited increased cytotoxic activity against MOLM-13 target cells expressing endogenous CD70 as compared to MOLM-13 CD70 knockout target cells (e.g., at a 1:1 E/T ratio, 67% killing of MOLM-13 target cells expressing endogenous CD70 vs. 57% killing of MOLM-13 CD70 KO target cells by NK cells expressing the anti-CD70 CAR of Construct #1).

### Example 5—Anti-CD70 Car Transduction of Peripheral Blood NKC Cells was Inversely Correlated with CD70 Expression

[0665] Peripheral blood NK cells were isolated from human leukapherisis samples using immunomagnetic separation beads. Isolated NK cells were activated with mitomycin C-treated artificial antigen presenting cells (aAPCs) prior to transduction and 75 IU/mL of recombinant IL-2 to enable NK cell activation and expansion. About 1.5×10⁵ NK cells were plated in 96-well tissue culture plates in a volume of 150 μL of AIM-V media containing 200 IU/mL of recombinant IL-2 and varying volumes of concentrated lentivirus particles encoding either an anti-CD70 CAR comprising a CD27 extracellular domain (“anti-CD70 CAR (CD27 receptor)”) or ZsGreen fluorescent protein (“ZsGreen”; as control). Plates were spun at 900×g for 90 minutes at room temperature, and then incubated at 37° C. 5% CO₂ for 2 days. After 2 days, the transduced NK cells were transferred to new 96-well tissue culture plates with fresh media containing 200 IU/mL of recombinant human IL-2 and then incubated at 37° C., 5% CO₂ for an additional 2 days. Four days post-transduction, the NK cells were harvested and washed with a solution of Dulbecco's phosphate-buffered saline (dPBS) containing 2% fetal bovine serum.

[0666] The NK cells were then incubated with a staining cocktail containing BRILLIANT VIOLET 421™ dye-conjugated anti-CD3 antibody (BIOLEGEND), BRILLIANT VIOLET 711™ dye-conjugated anti-CD16 antibody (BIOLEGEND), PE/DAZZLE™ 594 dye-conjugated anti-CD56 antibody (BIOLEGEND), allophycocyanin (APC)-conjugated anti-CD27 antibody (BIOLEGEND), phycoerythrin (PE)-conjugated anti-CD70 antibody (BIOLEGEND), and LIVE/DEAD™ fixable near-IR stain (THERMO FISHER SCIENTIFIC) for 30 minutes, then washed with a solution of dPBS containing 2% FBS. Samples were analyzed on the ATTUNE™ NXT flow cytometer (THERMO FISHER). Flow cytometry data were analyzed using FLOWJO™ software (BD BIOSCIENCES). CAR expression was measured as the percent of NK cells stained positively with the APC-conjugated anti-CD27 antibody, and CD70 expression was measured as the percent of NK cells stained positively with the PE-conjugated anti-CD70 antibody. The results are described in FIG. 11.

[0667] As shown in FIG. 11, CAR transduction and CD70 expression were found to be inversely correlated. Increasing expression of anti-CD70 CAR correlated with decreasing levels of CD70-positive NK cells. Thus, CD70 expression appears to drive anti-CD70 CAR-NK-mediated fratricide of CD70-expressing NK cells in vitro.

[0668] All of the methods disclosed and claimed herein can be made and executed without undue experimentation in light of the present disclosure. While the compositions and methods of this disclosure have been described in terms of preferred embodiments, it will be apparent to those of skill in the art that variations may be applied to the methods and in the steps or in the sequence of steps of the method described herein without departing from the concept, spirit and scope of the disclosure. More specifically, it will be apparent that certain agents which are both chemically and physiologically related may be substituted for the agents described herein while the same or similar results would be achieved. All such similar substitutes and modifications apparent to those skilled in the art are deemed to be within the spirit, scope and concept of the disclosure as defined by the appended claims.

### EMBODIMENTS

[0669] Embodiment 1. A method of making a population of genetically engineered Natural Killer (NK) cells, the method comprising:

[0670] (a) providing a population of NK cells;

[0671] (b) contacting the population of NK cells with a CD70 inhibitor; and

[0672] (c) expanding the population of NK cells in vitro.

[0673] Embodiment 2. The method of embodiment 1, wherein the population of NK cells is a population of human NK cells.

[0674] Embodiment 3. The method of embodiment 1, wherein the population of NK cells exhibits at least about 25% greater cell expansion compared to a population of NK cells that is not contacted with the CD70 inhibitor.

[0675] Embodiment 4. The method of embodiment 1, wherein the population of NK cells exhibits at least about 30%, about 40%, about 50%, about 60%, about 70%, about 80%, about 90% or about 100% greater cell expansion compared to a population of NK cells that is expanded under the same conditions but is not contacted with the CD70 inhibitor.

[0676] Embodiment 5. The method of embodiments 1-4, further comprising isolating at least one of CD56⁺ cells and/or CD3⁻/CD56⁺ cells from a population of peripheral blood mononuclear cells (PBMCs) to obtain the population of NK cells.

[0677] Embodiment 6. The method of embodiments 1-5, wherein the population of NK cells is derived from umbilical cord blood cells, PBMCs, mobilized peripheral blood stem cells (PBSCs), unmobilized PBSCs, human embryonic stem cells (hESCs), induced pluripotent stem cells (iPSCs), mesenchymal stem cells (MSCs), hematopoietic stem cells (HSCs), bone marrow, or CD34⁺ cells.

[0678] Embodiment 7. The method of any one of embodiments 1-6, wherein the expanding comprises culturing the population of NK cells in the presence of feeder cells.

[0679] Embodiment 8. The method of embodiment 7, wherein the feeder cells are an immortalized cell line.

[0680] Embodiment 9. The method of embodiment 7, wherein the feeder cells are autologous feeder cells.

[0681] Embodiment 10. The method of any one of embodiments 7-9, wherein the feeder cells have been irradiated.

[0682] Embodiment 11. The method of any one of embodiments 1-10, wherein the expanding comprises culturing the population of NK cells in a culture medium comprising recombinant human IL-12, recombinant human IL-8 and/or recombinant human IL-21.

[0683] Embodiment 12. The method of any one of embodiments 1-11, wherein the expanding is performed from about 1 day to about 7 days.

[0684] Embodiment 13. The method of any one of embodiments 1-11, wherein the expanding is performed from about 8 days to about 14 days.

[0685] Embodiment 14. The method of any one of embodiments 1-11, wherein the expanding is performed from about 15 days to about 21 days.

[0686] Embodiment 15. The method of any one of embodiments 1-11, wherein the expanding is performed from about 22 days to about 28 days.

[0687] Embodiment 16. The method of any one of embodiments 1-11, wherein the expanding is performed from about 29 days to about 42 days.

[0688] Embodiment 17. The method of any one of embodiments 1-16, wherein the CD70 inhibitor decreases the expression of CD70 polypeptide in at least one NK cell of the population of NK cells.

[0689] Embodiment 18. The method of any one of embodiments 1-17 wherein the CD70 inhibitor ablates the expression of CD70 polypeptide in at least one NK cell of the population of NK cells.

[0690] Embodiment 19. The method of any one of embodiments 1-18, wherein the CD70 inhibitor comprises a small interfering RNA (siRNA) that targets CD70 mRNA, a short hairpin RNA (shRNA) that targets CD70 mRNA, a nucleic acid encoding a siRNA that targets CD70 mRNA, a nucleic acid encoding an shRNA that targets CD70 mRNA, or a combination of any of the foregoing.

[0691] Embodiment 20. The method of any one of embodiments 1-19, wherein the CD70 inhibitor comprises a shRNA that targets CD70 mRNA or a nucleic acid encoding a shRNA that targets CD70 mRNA.

[0692] Embodiment 21. The method of embodiment 20, wherein the shRNA that targets CD70 mRNA comprises the nucleic acid sequence of any one of SEQ ID NOs: 2647-2652.

[0693] Embodiment 22. The method of any one of embodiments 1-18, wherein the CD70 inhibitor comprises an RNA-guided endonuclease and a guide RNA (gRNA) targeting a CD70 gene.

[0694] Embodiment 23. The method of any one of embodiments 1-16, wherein the CD70 inhibitor decreases the cell surface level of CD70 polypeptide in at least one NK cell of the population of NK cells.

[0695] Embodiment 24. The method of any one of embodiments 1-16 and 23, wherein the CD70 inhibitor comprises a Protein Expression Blocker (PEBL) or a nucleic acid encoding a PEBL, wherein the PEBL comprises a first antigen recognition domain that specifically binds human CD70 and one or more of a localizing domain, an intracellular retention domain and an endoplasmic reticulum (ER) retention domain.

[0696] Embodiment 25. The method of embodiment 24, wherein the first antigen recognition domain comprises a heavy chain variable domain (VH) and a light chain variable domain (VL), wherein: (a) the VH comprises a heavy chain complementarity determining region 1 (CDRH1) of SEQ ID NO: 86, a heavy chain complementarity determining region 2 (CDRH2) of SEQ ID NO: 87, and a heavy chain complementarity determining region 3 (CDRH3) of SEQ ID NO: 88, and the VL comprises a light chain complementarity determining region 1 (CDRL1) of SEQ ID NO: 89, a light chain complementarity determining region 2 (CDRL2) of SEQ ID NO: 90, and a light chain complementarity determining region 3 (CDRL3) of SEQ ID NO: 91; (b) the VH comprises a CDRH1 of SEQ ID NO: 25, a CDRH2 of SEQ ID NO: 26, and a CDRH3 of SEQ ID NO: 27, and the VL comprises a CDRL1 of SEQ ID NO: 28, a CDRL2 of SEQ ID NO: 29, and a CDRL3 of SEQ ID NO: 30; (c) the VH comprises a CDRH1 of SEQ ID NO: 35, a CDRH2 of SEQ ID NO: 36, and a CDRH3 of SEQ ID NO: 37, and the VL comprises a CDRL1 of SEQ ID NO: 38, a CDRL2 of SEQ ID NO: 39, and a CDRL3 of SEQ ID NO: 40; (d) the VH comprises a CDRH1 of SEQ ID NO: 45, a CDRH2 of SEQ ID NO: 46, and a CDRH3 of SEQ ID NO: 47, and the VL comprises a CDRL1 of SEQ ID NO: 48, a CDRL2 of SEQ ID NO: 49, and a CDRL3 of SEQ ID NO: 50; (e) the VH comprises a CDRH1 of SEQ ID NO: 55, a CDRH2 of SEQ ID NO: 56, and a CDRH3 of SEQ ID NO: 57, and the VL comprises a CDRL1 of SEQ ID NO: 58, a CDRL2 of SEQ ID NO: 59, and a CDRL3 of SEQ ID NO: 60; (f) the VH comprises a CDRH1 of SEQ ID NO: 15, a CDRH2 of SEQ ID NO: 16, and a CDRH3 of SEQ ID NO: 17, and the VL comprises a CDRL1 of SEQ ID NO: 18, a CDRL2 of SEQ ID NO: 19, and a CDRL3 of SEQ ID NO: 20; (g) the VH comprises a CDRH1 of SEQ ID NO: 96, a CDRH2 of SEQ ID NO: 97, and a CDRH3 of SEQ ID NO: 98, and the VL comprises a CDRL1 of SEQ ID NO: 99, a CDRL2 of SEQ ID NO: 100, and a CDRL3 of SEQ ID NO: 101; (h) the VH comprises a CDRH1 of SEQ ID NO: 196, a CDRH2 of SEQ ID NO: 197, and a CDRH3 of SEQ ID NO: 198, and the VL comprises a CDRL1 of SEQ ID NO: 478, a CDRL2 of SEQ ID NO: 479, and a CDRL3 of SEQ ID NO: 480; (i) the VH comprises a CDRH1 of SEQ ID NO: 202, a CDRH2 of SEQ ID NO: 203, and a CDRH3 of SEQ ID NO: 204, and the VL comprises a CDRL1 of SEQ ID NO: 481, a CDRL2 of SEQ ID NO: 482, and a CDRL3 of SEQ ID NO: 483; (j) the VH comprises a CDRH1 of SEQ ID NO: 1170, a CDRH2 of SEQ ID NO: 1171, and a CDRH3 of SEQ ID NO: 1172, and the VL comprises a CDRL1 of SEQ ID NO: 1857, a CDRL2 of SEQ ID NO: 1858, and a CDRL3 of SEQ ID NO: 1859; (k) the VH comprises a CDRH1 of SEQ ID NO: 1173, a CDRH2 of SEQ ID NO: 1174, and a CDRH3 of SEQ ID NO: 1175, and the VL comprises a CDRL1 of SEQ ID NO: 1860, a CDRL2 of SEQ ID NO: 1861, and a CDRL3 of SEQ ID NO: 1862; (1) the VH comprises a CDRH1 of SEQ ID NO: 1176, a CDRH2 of SEQ ID NO: 1177, and a CDRH3 of SEQ ID NO: 1178, and the VL comprises a CDRL1 of SEQ ID NO: 1863, a CDRL2 of SEQ ID NO: 1864, and a CDRL3 of SEQ ID NO: 1865; (m) the VH comprises a CDRH1 of SEQ ID NO: 1179, a CDRH2 of SEQ ID NO: 1180, and a CDRH3 of SEQ ID NO: 1181, and the VL comprises a CDRL1 of SEQ ID NO: 1866, a CDRL2 of SEQ ID NO: 1867, and a CDRL3 of SEQ ID NO: 1868; (n) the VH comprises a CDRH1 of SEQ ID NO: 1182, a CDRH2 of SEQ ID NO: 1183, and a CDRH3 of SEQ ID NO: 1184, and the VL comprises a CDRL1 of SEQ ID NO: 1869, a CDRL2 of SEQ ID NO: 1870, and a CDRL3 of SEQ ID NO: 1871; (o) the VH comprises a CDRH1 of SEQ ID NO: 1185, a CDRH2 of SEQ ID NO: 1186, and a CDRH3 of SEQ ID NO: 1187, and the VL comprises a CDRL1 of SEQ ID NO: 1872, a CDRL2 of SEQ ID NO: 1873, and a CDRL3 of SEQ ID NO: 1874; (p) the VH comprises a CDRH1 of SEQ ID NO: 1188, a CDRH2 of SEQ ID NO: 1189, and a CDRH3 of SEQ ID NO: 1190, and the VL comprises a CDRL1 of SEQ ID NO: 1875, a CDRL2 of SEQ ID NO: 1876, and a CDRL3 of SEQ ID NO: 1877; (q) the VH comprises a CDRH1 of SEQ ID NO: 1524, a CDRH2 of SEQ ID NO: 1525, and a CDRH3 of SEQ ID NO: 1526, and the VL comprises a CDRL1 of SEQ ID NO: 2211, a CDRL2 of SEQ ID NO: 2212, and a CDRL3 of SEQ ID NO: 2213; (r) the VH comprises a CDRH1 of SEQ ID NO: 1527, a CDRH2 of SEQ ID NO: 1528, and a CDRH3 of SEQ ID NO: 1529, and the VL comprises a CDRL1 of SEQ ID NO: 2214, a CDRL2 of SEQ ID NO: 2215, and a CDRL3 of SEQ ID NO: 2216; (s) the VH comprises a CDRH1 of SEQ ID NO: 1530, a CDRH2 of SEQ ID NO: 1531, and a CDRH3 of SEQ ID NO: 1532, and the VL comprises a CDRL1 of SEQ ID NO: 2217, a CDRL2 of SEQ ID NO: 2218, and a CDRL3 of SEQ ID NO: 2219; (t) the VH comprises a CDRH1 of SEQ ID NO: 1533, a CDRH2 of SEQ ID NO: 1534, and a CDRH3 of SEQ ID NO: 1535, and the VL comprises a CDRL1 of SEQ ID NO: 2220, a CDRL2 of SEQ ID NO: 2221, and a CDRL3 of SEQ ID NO: 2222; (u) the VH comprises a CDRH1 of SEQ ID NO: 1539, a CDRH2 of SEQ ID NO: 1540, and a CDRH3 of SEQ ID NO: 1541, and the VL comprises a CDRL1 of SEQ ID NO: 2226, a CDRL2 of SEQ ID NO: 2227, and a CDRL3 of SEQ ID NO: 2228; (v) the VH comprises a CDRH1 of SEQ ID NO: 1542, a CDRH2 of SEQ ID NO: 1543, and a CDRH3 of SEQ ID NO: 1544, and the VL comprises a CDRL1 of SEQ ID NO: 2229, a CDRL2 of SEQ ID NO: 2230, and a CDRL3 of SEQ ID NO: 2231; (w) the VH comprises a CDRH1 of SEQ ID NO: 1548, a CDRH2 of SEQ ID NO: 1549, and a CDRH3 of SEQ ID NO: 1550, and the VL comprises a CDRL1 of SEQ ID NO: 2235, a CDRL2 of SEQ ID NO: 2236, and a CDRL3 of SEQ ID NO: 2237; (x) the VH comprises a CDRH1 of SEQ ID NO: 1551, a CDRH2 of SEQ ID NO: 1552, and a CDRH3 of SEQ ID NO: 1553, and the VL comprises a CDRL1 of SEQ ID NO: 2238, a CDRL2 of SEQ ID NO: 2239, and a CDRL3 of SEQ ID NO: 2240; (y) the VH comprises a CDRH1 of SEQ ID NO: 1554, a CDRH2 of SEQ ID NO: 1555, and a CDRH3 of SEQ ID NO: 1556, and the VL comprises a CDRL1 of SEQ ID NO: 2241, a CDRL2 of SEQ ID NO: 2242, and a CDRL3 of SEQ ID NO: 2243; (z) the VH comprises a CDRH1 of SEQ ID NO: 1557, a CDRH2 of SEQ ID NO: 1558, and a CDRH3 of SEQ ID NO: 1559, and the VL comprises a CDRL1 of SEQ ID NO: 2244, a CDRL2 of SEQ ID NO: 2245, and a CDRL3 of SEQ ID NO: 2246; (aa) the VH comprises a CDRH1 of SEQ ID NO: 1560, a CDRH2 of SEQ ID NO: 1561, and a CDRH3 of SEQ ID NO: 1562, and the VL comprises a CDRL1 of SEQ ID NO: 2247, a CDRL2 of SEQ ID NO: 2248, and a CDRL3 of SEQ ID NO: 2249; (bb) the VH comprises a CDRH1 of SEQ ID NO: 1563, a CDRH2 of SEQ ID NO: 1564, and a CDRH3 of SEQ ID NO: 1565, and the VL comprises a CDRL1 of SEQ ID NO: 2250, a CDRL2 of SEQ ID NO: 2251, and a CDRL3 of SEQ ID NO: 2252; (cc) the VH comprises a CDRH1 of SEQ ID NO: 1566, a CDRH2 of SEQ ID NO: 1567, and a CDRH3 of SEQ ID NO: 1568, and the VL comprises a CDRL1 of SEQ ID NO: 2253, a CDRL2 of SEQ ID NO: 2254, and a CDRL3 of SEQ ID NO: 2255; (dd) the VH comprises a CDRH1 of SEQ ID NO: 1572, a CDRH2 of SEQ ID NO: 1573, and a CDRH3 of SEQ ID NO: 1574, and the VL comprises a CDRL1 of SEQ ID NO: 2259, a CDRL2 of SEQ ID NO: 2260, and a CDRL3 of SEQ ID NO: 2261; (ee) the VH comprises a CDRH1 of SEQ ID NO: 1575, a CDRH2 of SEQ ID NO: 1576, and a CDRH3 of SEQ ID NO: 1577, and the VL comprises a CDRL1 of SEQ ID NO: 2262, a CDRL2 of SEQ ID NO: 2263, and a CDRL3 of SEQ ID NO: 2264; (ff) the VH comprises a CDRH1 of SEQ ID NO: 1578, a CDRH2 of SEQ ID NO: 1579, and a CDRH3 of SEQ ID NO: 1580, and the VL comprises a CDRL1 of SEQ ID NO: 2265, a CDRL2 of SEQ ID NO: 2266, and a CDRL3 of SEQ ID NO: 2267; (gg) the VH comprises a CDRH1 of SEQ ID NO: 1587, a CDRH2 of SEQ ID NO: 1588, and a CDRH3 of SEQ ID NO: 1589, and the VL comprises a CDRL1 of SEQ ID NO: 2274, a CDRL2 of SEQ ID NO: 2275, and a CDRL3 of SEQ ID NO: 2276; (hh) the VH comprises a CDRH1 of SEQ ID NO: 1590, a CDRH2 of SEQ ID NO: 1591, and a CDRH3 of SEQ ID NO: 1592, and the VL comprises a CDRL1 of SEQ ID NO: 2277, a CDRL2 of SEQ ID NO: 2278, and a CDRL3 of SEQ ID NO: 2279; (ii) the VH comprises a CDRH1 of SEQ ID NO: 1593, a CDRH2 of SEQ ID NO: 1594, and a CDRH3 of SEQ ID NO: 1595, and the VL comprises a CDRL1 of SEQ ID NO: 2280, a CDRL2 of SEQ ID NO: 2281, and a CDRL3 of SEQ ID NO: 2282; (jj) the VH comprises a CDRH1 of SEQ ID NO: 1596, a CDRH2 of SEQ ID NO: 1597, and a CDRH3 of SEQ ID NO: 1598, and the VL comprises a CDRL1 of SEQ ID NO: 2283, a CDRL2 of SEQ ID NO: 2284, and a CDRL3 of SEQ ID NO: 2285; (kk) the VH comprises a CDRH1 of SEQ ID NO: 1599, a CDRH2 of SEQ ID NO: 1560, and a CDRH3 of SEQ ID NO: 1561, and the VL comprises a CDRL1 of SEQ ID NO: 2286, a CDRL2 of SEQ ID NO: 2287, and a CDRL3 of SEQ ID NO: 2288; (11) the VH comprises a CDRH1 of SEQ ID NO: 1602, a CDRH2 of SEQ ID NO: 1603, and a CDRH3 of SEQ ID NO: 1604, and the VL comprises a CDRL1 of SEQ ID NO: 2289, a CDRL2 of SEQ ID NO: 2290, and a CDRL3 of SEQ ID NO: 2291; (mm) the VH comprises a CDRH1 of SEQ ID NO: 1605, a CDRH2 of SEQ ID NO: 1606, and a CDRH3 of SEQ ID NO: 1607, and the VL comprises a CDRL1 of SEQ ID NO: 2292, a CDRL2 of SEQ ID NO: 2293, and a CDRL3 of SEQ ID NO: 2294; (nn) the VH comprises a CDRH1 of SEQ ID NO: 1608, a CDRH2 of SEQ ID NO: 1609, and a CDRH3 of SEQ ID NO: 1610, and the VL comprises a CDRL1 of SEQ ID NO: 2295, a CDRL2 of SEQ ID NO: 2296, and a CDRL3 of SEQ ID NO: 2297; (oo) the VH comprises a CDRH1 of SEQ ID NO: 1611, a CDRH2 of SEQ ID NO: 1612, and a CDRH3 of SEQ ID NO: 1613, and the VL comprises a CDRL1 of SEQ ID NO: 2298, a CDRL2 of SEQ ID NO: 2299, and a CDRL3 of SEQ ID NO: 2300; (pp) the VH comprises a CDRH1 of SEQ ID NO: 1614, a CDRH2 of SEQ ID NO: 1615, and a CDRH3 of SEQ ID NO: 1616, and the VL comprises a CDRL1 of SEQ ID NO: 2301, a CDRL2 of SEQ ID NO: 2302, and a CDRL3 of SEQ ID NO: 2303; (qq) the VH comprises a CDRH1 of SEQ ID NO: 1617, a CDRH2 of SEQ ID NO: 1618, and a CDRH3 of SEQ ID NO: 1619, and the VL comprises a CDRL1 of SEQ ID NO: 2304, a CDRL2 of SEQ ID NO: 2305, and a CDRL3 of SEQ ID NO: 2306; (rr) the VH comprises a CDRH1 of SEQ ID NO: 1626, a CDRH2 of SEQ ID NO: 1627, and a CDRH3 of SEQ ID NO: 1628, and the VL comprises a CDRL1 of SEQ ID NO: 2313, a CDRL2 of SEQ ID NO: 2314, and a CDRL3 of SEQ ID NO: 2315; (ss) the VH comprises a CDRH1 of SEQ ID NO: 1629, a CDRH2 of SEQ ID NO: 1630, and a CDRH3 of SEQ ID NO: 1631, and the VL comprises a CDRL1 of SEQ ID NO: 2316, a CDRL2 of SEQ ID NO: 2317, and a CDRL3 of SEQ ID NO: 2318; (tt) the VH comprises a CDRH1 of SEQ ID NO: 1632, a CDRH2 of SEQ ID NO: 1633, and a CDRH3 of SEQ ID NO: 1634, and the VL comprises a CDRL1 of SEQ ID NO: 2319, a CDRL2 of SEQ ID NO: 2320, and a CDRL3 of SEQ ID NO: 2321; (uu) the VH comprises a CDRH1 of SEQ ID NO: 1635, a CDRH2 of SEQ ID NO: 1636, and a CDRH3 of SEQ ID NO: 1637, and the VL comprises a CDRL1 of SEQ ID NO: 2322, a CDRL2 of SEQ ID NO: 2323, and a CDRL3 of SEQ ID NO: 2324; (vv) the VH comprises a CDRH1 of SEQ ID NO: 1638, a CDRH2 of SEQ ID NO: 1639, and a CDRH3 of SEQ ID NO: 1640, and the VL comprises a CDRL1 of SEQ ID NO: 2325, a CDRL2 of SEQ ID NO: 2326, and a CDRL3 of SEQ ID NO: 2327; (ww) the VH comprises a CDRH1 of SEQ ID NO: 1641, a CDRH2 of SEQ ID NO: 1642, and a CDRH3 of SEQ ID NO: 1643, and the VL comprises a CDRL1 of SEQ ID NO: 2328, a CDRL2 of SEQ ID NO: 2329, and a CDRL3 of SEQ ID NO: 2330; (xx) the VH comprises a CDRH1 of SEQ ID NO: 1644, a CDRH2 of SEQ ID NO: 1645, and a CDRH3 of SEQ ID NO: 1646, and the VL comprises a CDRL1 of SEQ ID NO: 2331, a CDRL2 of SEQ ID NO: 2332, and a CDRL3 of SEQ ID NO: 2333; (yy) the VH comprises a CDRH1 of SEQ ID NO: 1647, a CDRH2 of SEQ ID NO: 1648, and a CDRH3 of SEQ ID NO: 1649, and the VL comprises a CDRL1 of SEQ ID NO: 2334, a CDRL2 of SEQ ID NO: 2335, and a CDRL3 of SEQ ID NO: 2336; (zz) the VH comprises a CDRH1 of SEQ ID NO: 1650, a CDRH2 of SEQ ID NO: 1651, and a CDRH3 of SEQ ID NO: 1652, and the VL comprises a CDRL1 of SEQ ID NO: 2337, a CDRL2 of SEQ ID NO: 2338, and a CDRL3 of SEQ ID NO: 2339; (aaa) the VH comprises a CDRH1 of SEQ ID NO: 1653, a CDRH2 of SEQ ID NO: 1654, and a CDRH3 of SEQ ID NO: 1655, and the VL comprises a CDRL1 of SEQ ID NO: 2340, a CDRL2 of SEQ ID NO: 2341, and a CDRL3 of SEQ ID NO: 2342; (bbb) the VH comprises a CDRH1 of SEQ ID NO: 1656, a CDRH2 of SEQ ID NO: 1657, and a CDRH3 of SEQ ID NO: 1658, and the VL comprises a CDRL1 of SEQ ID NO: 2343, a CDRL2 of SEQ ID NO: 2344, and a CDRL3 of SEQ ID NO: 2345; or (ccc) the VH comprises a CDRH1 of SEQ ID NO: 1659, a CDRH2 of SEQ ID NO: 1660, and a CDRH3 of SEQ ID NO: 1661, and the VL comprises a CDRL1 of SEQ ID NO: 2346, a CDRL2 of SEQ ID NO: 2347, and a CDRL3 of SEQ ID NO: 2348.

[0697] Embodiment 26. The method of embodiment 24 or 25, wherein the first antigen recognition domain comprises a VH and a VL, wherein: (a) the VH comprises SEQ ID NO: 82 and the VL comprises SEQ ID NO: 84; (b) the VH comprises SEQ ID NO: 21 and the VL comprises SEQ ID NO: 23; (c) the VH comprises SEQ ID NO: 31 and the VL comprises SEQ ID NO: 33; (d) the VH comprises SEQ ID NO: 41 and the VL comprises SEQ ID NO: 43; (e) the VH comprises SEQ ID NO: 51 and the VL comprises SEQ ID NO: 53; (f) the VH comprises SEQ ID NO: 61 and the VL comprises SEQ ID NO: 63; (g) the VH comprises SEQ ID NO: 693 and the VL comprises SEQ ID NO: 66; (h) the VH comprises SEQ ID NO: 694 and the VL comprises SEQ ID NO: 69; (i) the VH comprises SEQ ID NO: 695 and the VL comprises SEQ ID NO: 72; (j) the VH comprises SEQ ID NO: 74 and the VL comprises SEQ ID NO: 76; (k) the VH comprises SEQ ID NO: 78 and the VL comprises SEQ ID NO: 80; (1) the VH comprises SEQ ID NO: 11 and the VL comprises SEQ ID NO: 13; (m) the VH comprises SEQ ID NO: 92 and the VL comprises SEQ ID NO: 94; (n) the VH comprises SEQ ID NO: 102 and the VL comprises SEQ ID NO: 103; (o) the VH comprises SEQ ID NO: 104 and the VL comprises SEQ ID NO: 105; (p) the VH comprises SEQ ID NO: 712 and the VL comprises SEQ ID NO: 713; (q) the VH comprises SEQ ID NO: 714 and the VL comprises SEQ ID NO: 715; (r) the VH comprises SEQ ID NO: 716 and the VL comprises SEQ ID NO: 717; (s) the VH comprises SEQ ID NO: 718 and the VL comprises SEQ ID NO: 719; (t) the VH comprises SEQ ID NO: 720 and the VL comprises SEQ ID NO: 721; (u) the VH comprises SEQ ID NO: 722 and the VL comprises SEQ ID NO: 723; (v) the VH comprises SEQ ID NO: 724 and the VL comprises SEQ ID NO: 725; (w) the VH comprises SEQ ID NO: 948 and the VL comprises SEQ ID NO: 949; (x) the VH comprises SEQ ID NO: 950 and the VL comprises SEQ ID NO: 951; (y) the VH comprises SEQ ID NO: 952 and the VL comprises SEQ ID NO: 953; (z) the VH comprises SEQ ID NO: 954 and the VL comprises SEQ ID NO: 955; (aa) the VH comprises SEQ ID NO: 958 and the VL comprises SEQ ID NO: 959; (bb) the VH comprises SEQ ID NO: 960 and the VL comprises SEQ ID NO: 961; (cc) the VH comprises SEQ ID NO: 964 and the VL comprises SEQ ID NO: 965; (dd) the VH comprises SEQ ID NO: 966 and the VL comprises SEQ ID NO: 967; (ee) the VH comprises SEQ ID NO: 968 and the VL comprises SEQ ID NO: 969; (ff) the VH comprises SEQ ID NO: 970 and the VL comprises SEQ ID NO: 971; (gg) the VH comprises SEQ ID NO: 972 and the VL comprises SEQ ID NO: 973; (hh) the VH comprises SEQ ID NO: 974 and the VL comprises SEQ ID NO: 975; (ii) the VH comprises SEQ ID NO: 976 and the VL comprises SEQ ID NO: 977; (jj) the VH comprises SEQ ID NO: 980 and the VL comprises SEQ ID NO: 981; (kk) the VH comprises SEQ ID NO: 982 and the VL comprises SEQ ID NO: 983; (11) the VH comprises SEQ ID NO: 984 and the VL comprises SEQ ID NO: 985; (mm) the VH comprises SEQ ID NO: 990 and the VL comprises SEQ ID NO: 991; (nn) the VH comprises SEQ ID NO: 992 and the VL comprises SEQ ID NO: 993; (oo) the VH comprises SEQ ID NO: 994 and the VL comprises SEQ ID NO: 995; (pp) the VH comprises SEQ ID NO: 996 and the VL comprises SEQ ID NO: 997; (qq) the VH comprises SEQ ID NO: 998 and the VL comprises SEQ ID NO: 999; (rr) the VH comprises SEQ ID NO: 1000 and the VL comprises SEQ ID NO: 1001; (ss) the VH comprises SEQ ID NO: 1002 and the VL comprises SEQ ID NO: 1003; (tt) the VH comprises SEQ ID NO: 1004 and the VL comprises SEQ ID NO: 1005; (uu) the VH comprises SEQ ID NO: 1006 and the VL comprises SEQ ID NO: 1007; (vv) the VH comprises SEQ ID NO: 1008 and the VL comprises SEQ ID NO: 1009; (ww) the VH comprises SEQ ID NO: 1010 and the VL comprises SEQ ID NO: 1011; (xx) the VH comprises SEQ ID NO: 1016 and the VL comprises SEQ ID NO: 1017; (yy) the VH comprises SEQ ID NO: 1018 and the VL comprises SEQ ID NO: 1019; (zz) the VH comprises SEQ ID NO: 1020 and the VL comprises SEQ ID NO: 1021; (aaa) the VH comprises SEQ ID NO: 1022 and the VL comprises SEQ ID NO: 1023; (bbb) the VH comprises SEQ ID NO: 1024 and the VL comprises SEQ ID NO: 1025; (ccc) the VH comprises SEQ ID NO: 1026 and the VL comprises SEQ ID NO: 1027; (ddd) the VH comprises SEQ ID NO: 1028 and the VL comprises SEQ ID NO: 1029; (eee) the VH comprises SEQ ID NO: 1030 and the VL comprises SEQ ID NO: 1031; (fff) the VH comprises SEQ ID NO: 1032 and the VL comprises SEQ ID NO: 1033; (ggg) the VH comprises SEQ ID NO: 1034 and the VL comprises SEQ ID NO: 1035; (hhh) the VH comprises SEQ ID NO: 1036 and the VL comprises SEQ ID NO: 1037; or (iii) the VH comprises SEQ ID NO: 1038 and the VL comprises SEQ ID NO: 1039.

[0698] Embodiment 27. The method of any one of embodiments 1-16, wherein the CD70 inhibitor comprises an antagonistic anti-CD70 antibody or an antigen-binding fragment thereof.

[0699] Embodiment 28. The method of embodiment 27, wherein the antagonistic anti-CD70 antibody or the antigen-binding fragment thereof inhibits the interaction between CD70 and CD27.

[0700] Embodiment 29. The method of embodiment 27 or 28, wherein the antagonistic anti-CD70 antibody or the antigen-binding fragment thereof comprises a VH and a VL wherein: a) the VH comprises SEQ ID NO: 1162 and the VL comprises SEQ ID NO: 1163; b) the VH comprises SEQ ID NO: 51 and the VL comprises SEQ ID NO: 53; c) the VH comprises SEQ ID NO: 11 and the VL comprises SEQ ID NO: 13; d) the VH comprises SEQ ID NO: 694 and the VL comprises SEQ ID NO: 69; e) the VH comprises SEQ ID NO: 1118 and the VL comprises SEQ ID NO: 1119; f) the VH comprises SEQ ID NO: 1120 and the VL comprises SEQ ID NO: 1121; g) the VH comprises SEQ ID NO: 1116 and the VL comprises SEQ ID NO: 1117; h) the VH comprises SEQ ID NO: 1104 and the VL comprises SEQ ID NO: 1105; i) the VH comprises SEQ ID NO: 1094 and the VL comprises SEQ ID NO: 1095; j) the VH comprises SEQ ID NO: 1084 and the VL comprises SEQ ID NO: 1085; k) the VH comprises SEQ ID NO: 1092 and the VL comprises SEQ ID NO: 1093; 1) the VH comprises SEQ ID NO: 1082 and the VL comprises SEQ ID NO: 1083; or m) the VH comprises SEQ ID NO: 1074 and the VL comprises SEQ ID NO: 1075.

[0701] Embodiment 30. The method of any one of embodiments 27-29, wherein the antagonistic anti-CD70 antibody is cusatuzumab, MDX-1411, 27B3, 57B6, 59D10, 19G10, 9B2, 5B2, 9G2, 5F4, 9D1, and/or SGN70.

[0702] Embodiment 31. The method of any one of embodiments 1-30, wherein at least one cell in the population of NK cells comprises a knockout or knockdown of a cellular gene.

[0703] Embodiment 32. The method of embodiment 31, wherein the cellular gene is selected from CISH, PD1, TGFBR1, TGFBR2, or a combination thereof.

[0704] Embodiment 33. The method of any one of embodiments 1-32, further comprising (d) contacting the population of NK cells with a first polynucleotide encoding a first chimeric antigen receptor (CAR) under conditions sufficient to transfer the polynucleotide across a cell membrane of at least one NK cell in the population of NK cells, wherein the first CAR comprises: (i) an extracellular domain comprising a second antigen recognition domain that specifically binds human CD70; (ii) a transmembrane domain; and (iii) an intracellular domain.

[0705] Embodiment 34. The method of embodiment 33, further comprising culturing the modified population of NK cells under conditions suitable for integration of the first polynucleotide into the genome of at least one NK cell in the population of NK cells.

[0706] Embodiment 35. The method of embodiment 33 or 34, wherein step (d) is performed prior to step (b).

[0707] Embodiment 36. The method of embodiment 33 or 34, wherein step (d) is performed concurrently with step (b).

[0708] Embodiment 37. The method of embodiment 33 or 34, wherein step (d) is performed after step (b).

[0709] Embodiment 38. The method of embodiment 33 or 34, wherein step (d) is performed after step (c).

[0710] Embodiment 39. The method of embodiment 38, further comprising expanding the population of NK cells in vitro after step (d).

[0711] Embodiment 40. The method of any one of embodiments 1-39, wherein step (c) comprises expanding the population of NK cells by at least 1,000-fold in culture.

[0712] Embodiment 41. The method of any one of embodiments 1-40, wherein step (b) and/or step (d) comprises use of a viral vector, electroporation, a transposon/transposase system, a lipid nanoparticle or a charge-altering releasable transporter.

[0713] Embodiment 42. The method of embodiment 39, wherein step (b) and/or step (d) comprises the use of a viral vector, and wherein the viral vector is a lentivirus, a gamma retrovirus, an adeno-associated virus, an adenovirus, or a herpes simplex virus.

[0714] Embodiment 43. The method of embodiment 39, wherein step (b) and/or step (d) comprises the use of the transposon/transposase system, and wherein the transposon/transposase system comprises piggyBac, hyperactive piggyBac, Sleeping Beauty (SB), hyperactive SB, SB11, SB110, Tn7, TcBuster, hyperactive TcBuster, Mos1, Tcl/mariner, Tol2, mini-Tol2, Tc3, MuA, Himar I, Frog Prince, Helitron, L1 retrotransposon, IS5, Tn10, Tn903, SPIN, hAT, Hermes, hobo, AeBuster1, AeBuster2, AeBuster3, BtBuster1, BtBuster2, CfBuster1, or CfBuster2.

[0715] Embodiment 44. The method of any one of embodiments 33-43, wherein the first CAR comprises a signal peptide.

[0716] Embodiment 45. The method of any one of embodiments 33-44, wherein the second antigen recognition domain comprises a scFv comprising a VH and a VL, wherein: (a) the VH comprises a CDRH1 of SEQ ID NO: 86, a CDRH2 of SEQ ID NO: 87, and a CDRH3 of SEQ ID NO: 88, and the VL comprises a CDRL1 of SEQ ID NO: 89, a CDRL2 of SEQ ID NO: 90, and a CDRL3 of SEQ ID NO: 91; (b) the VH comprises a CDRH1 of SEQ ID NO: 25, a CDRH2 of SEQ ID NO: 26, and a CDRH3 of SEQ ID NO: 27, and the VL comprises a CDRL1 of SEQ ID NO: 28, a CDRL2 of SEQ ID NO: 29, and a CDRL3 of SEQ ID NO: 30; (c) the VH comprises a CDRH1 of SEQ ID NO: 35, a CDRH2 of SEQ ID NO: 36, and a CDRH3 of SEQ ID NO: 37, and the VL comprises a CDRL1 of SEQ ID NO: 38, a CDRL2 of SEQ ID NO: 39, and a CDRL3 of SEQ ID NO: 40; (d) the VH comprises a CDRH1 of SEQ ID NO: 45, a CDRH2 of SEQ ID NO: 46, and a CDRH3 of SEQ ID NO: 47, and the VL comprises a CDRL1 of SEQ ID NO: 48, a CDRL2 of SEQ ID NO: 49, and a CDRL3 of SEQ ID NO: 50; (e) the VH comprises a CDRH1 of SEQ ID NO: 55, a CDRH2 of SEQ ID NO: 56, and a CDRH3 of SEQ ID NO: 57, and the VL comprises a CDRL1 of SEQ ID NO: 58, a CDRL2 of SEQ ID NO: 59, and a CDRL3 of SEQ ID NO: 60; (f) the VH comprises a CDRH1 of SEQ ID NO: 15, a CDRH2 of SEQ ID NO: 16, and a CDRH3 of SEQ ID NO: 17, and the VL comprises a CDRL1 of SEQ ID NO: 18, a CDRL2 of SEQ ID NO: 19, and a CDRL3 of SEQ ID NO: 20; (g) the VH comprises a CDRH1 of SEQ ID NO: 96, a CDRH2 of SEQ ID NO: 97, and a CDRH3 of SEQ ID NO: 98, and the VL comprises a CDRL1 of SEQ ID NO: 99, a CDRL2 of SEQ ID NO: 100, and a CDRL3 of SEQ ID NO: 101; (h) the VH comprises a CDRH1 of SEQ ID NO: 196, a CDRH2 of SEQ ID NO: 197, and a CDRH3 of SEQ ID NO: 198, and the VL comprises a CDRL1 of SEQ ID NO: 478, a CDRL2 of SEQ ID NO: 479, and a CDRL3 of SEQ ID NO: 480; (i) the VH comprises a CDRH1 of SEQ ID NO: 202, a CDRH2 of SEQ ID NO: 203, and a CDRH3 of SEQ ID NO: 204, and the VL comprises a CDRL1 of SEQ ID NO: 481, a CDRL2 of SEQ ID NO: 482, and a CDRL3 of SEQ ID NO: 483; (j) the VH comprises a CDRH1 of SEQ ID NO: 1170, a CDRH2 of SEQ ID NO: 1171, and a CDRH3 of SEQ ID NO: 1172, and the VL comprises a CDRL1 of SEQ ID NO: 1857, a CDRL2 of SEQ ID NO: 1858, and a CDRL3 of SEQ ID NO: 1859; (k) the VH comprises a CDRH1 of SEQ ID NO: 1173, a CDRH2 of SEQ ID NO: 1174, and a CDRH3 of SEQ ID NO: 1175, and the VL comprises a CDRL1 of SEQ ID NO: 1860, a CDRL2 of SEQ ID NO: 1861, and a CDRL3 of SEQ ID NO: 1862; (1) the VH comprises a CDRH1 of SEQ ID NO: 1176, a CDRH2 of SEQ ID NO: 1177, and a CDRH3 of SEQ ID NO: 1178, and the VL comprises a CDRL1 of SEQ ID NO: 1863, a CDRL2 of SEQ ID NO: 1864, and a CDRL3 of SEQ ID NO: 1865; (m) the VH comprises a CDRH1 of SEQ ID NO: 1179, a CDRH2 of SEQ ID NO: 1180, and a CDRH3 of SEQ ID NO: 1181, and the VL comprises a CDRL1 of SEQ ID NO: 1866, a CDRL2 of SEQ ID NO: 1867, and a CDRL3 of SEQ ID NO: 1868; (n) the VH comprises a CDRH1 of SEQ ID NO: 1182, a CDRH2 of SEQ ID NO: 1183, and a CDRH3 of SEQ ID NO: 1184, and the VL comprises a CDRL1 of SEQ ID NO: 1869, a CDRL2 of SEQ ID NO: 1870, and a CDRL3 of SEQ ID NO: 1871; (o) the VH comprises a CDRH1 of SEQ ID NO: 1185, a CDRH2 of SEQ ID NO: 1186, and a CDRH3 of SEQ ID NO: 1187, and the VL comprises a CDRL1 of SEQ ID NO: 1872, a CDRL2 of SEQ ID NO: 1873, and a CDRL3 of SEQ ID NO: 1874; (p) the VH comprises a CDRH1 of SEQ ID NO: 1188, a CDRH2 of SEQ ID NO: 1189, and a CDRH3 of SEQ ID NO: 1190, and the VL comprises a CDRL1 of SEQ ID NO: 1875, a CDRL2 of SEQ ID NO: 1876, and a CDRL3 of SEQ ID NO: 1877; (q) the VH comprises a CDRH1 of SEQ ID NO: 1524, a CDRH2 of SEQ ID NO: 1525, and a CDRH3 of SEQ ID NO: 1526, and the VL comprises a CDRL1 of SEQ ID NO: 2211, a CDRL2 of SEQ ID NO: 2212, and a CDRL3 of SEQ ID NO: 2213; (r) the VH comprises a CDRH1 of SEQ ID NO: 1527, a CDRH2 of SEQ ID NO: 1528, and a CDRH3 of SEQ ID NO: 1529, and the VL comprises a CDRL1 of SEQ ID NO: 2214, a CDRL2 of SEQ ID NO: 2215, and a CDRL3 of SEQ ID NO: 2216; (s) the VH comprises a CDRH1 of SEQ ID NO: 1530, a CDRH2 of SEQ ID NO: 1531, and a CDRH3 of SEQ ID NO: 1532, and the VL comprises a CDRL1 of SEQ ID NO: 2217, a CDRL2 of SEQ ID NO: 2218, and a CDRL3 of SEQ ID NO: 2219; (t) the VH comprises a CDRH1 of SEQ ID NO: 1533, a CDRH2 of SEQ ID NO: 1534, and a CDRH3 of SEQ ID NO: 1535, and the VL comprises a CDRL1 of SEQ ID NO: 2220, a CDRL2 of SEQ ID NO: 2221, and a CDRL3 of SEQ ID NO: 2222; (u) the VH comprises a CDRH1 of SEQ ID NO: 1539, a CDRH2 of SEQ ID NO: 1540, and a CDRH3 of SEQ ID NO: 1541, and the VL comprises a CDRL1 of SEQ ID NO: 2226, a CDRL2 of SEQ ID NO: 2227, and a CDRL3 of SEQ ID NO: 2228; (v) the VH comprises a CDRH1 of SEQ ID NO: 1542, a CDRH2 of SEQ ID NO: 1543, and a CDRH3 of SEQ ID NO: 1544, and the VL comprises a CDRL1 of SEQ ID NO: 2229, a CDRL2 of SEQ ID NO: 2230, and a CDRL3 of SEQ ID NO: 2231; (w) the VH comprises a CDRH1 of SEQ ID NO: 1548, a CDRH2 of SEQ ID NO: 1549, and a CDRH3 of SEQ ID NO: 1550, and the VL comprises a CDRL1 of SEQ ID NO: 2235, a CDRL2 of SEQ ID NO: 2236, and a CDRL3 of SEQ ID NO: 2237; (x) the VH comprises a CDRH1 of SEQ ID NO: 1551, a CDRH2 of SEQ ID NO: 1552, and a CDRH3 of SEQ ID NO: 1553, and the VL comprises a CDRL1 of SEQ ID NO: 2238, a CDRL2 of SEQ ID NO: 2239, and a CDRL3 of SEQ ID NO: 2240; (y) the VH comprises a CDRH1 of SEQ ID NO: 1554, a CDRH2 of SEQ ID NO: 1555, and a CDRH3 of SEQ ID NO: 1556, and the VL comprises a CDRL1 of SEQ ID NO: 2241, a CDRL2 of SEQ ID NO: 2242, and a CDRL3 of SEQ ID NO: 2243; (z) the VH comprises a CDRH1 of SEQ ID NO: 1557, a CDRH2 of SEQ ID NO: 1558, and a CDRH3 of SEQ ID NO: 1559, and the VL comprises a CDRL1 of SEQ ID NO: 2244, a CDRL2 of SEQ ID NO: 2245, and a CDRL3 of SEQ ID NO: 2246; (aa) the VH comprises a CDRH1 of SEQ ID NO: 1560, a CDRH2 of SEQ ID NO: 1561, and a CDRH3 of SEQ ID NO: 1562, and the VL comprises a CDRL1 of SEQ ID NO: 2247, a CDRL2 of SEQ ID NO: 2248, and a CDRL3 of SEQ ID NO: 2249; (bb) the VH comprises a CDRH1 of SEQ ID NO: 1563, a CDRH2 of SEQ ID NO: 1564, and a CDRH3 of SEQ ID NO: 1565, and the VL comprises a CDRL1 of SEQ ID NO: 2250, a CDRL2 of SEQ ID NO: 2251, and a CDRL3 of SEQ ID NO: 2252; (cc) the VH comprises a CDRH1 of SEQ ID NO: 1566, a CDRH2 of SEQ ID NO: 1567, and a CDRH3 of SEQ ID NO: 1568, and the VL comprises a CDRL1 of SEQ ID NO: 2253, a CDRL2 of SEQ ID NO: 2254, and a CDRL3 of SEQ ID NO: 2255; (dd) the VH comprises a CDRH1 of SEQ ID NO: 1572, a CDRH2 of SEQ ID NO: 1573, and a CDRH3 of SEQ ID NO: 1574, and the VL comprises a CDRL1 of SEQ ID NO: 2259, a CDRL2 of SEQ ID NO: 2260, and a CDRL3 of SEQ ID NO: 2261; (ee) the VH comprises a CDRH1 of SEQ ID NO: 1575, a CDRH2 of SEQ ID NO: 1576, and a CDRH3 of SEQ ID NO: 1577, and the VL comprises a CDRL1 of SEQ ID NO: 2262, a CDRL2 of SEQ ID NO: 2263, and a CDRL3 of SEQ ID NO: 2264; (ff) the VH comprises a CDRH1 of SEQ ID NO: 1578, a CDRH2 of SEQ ID NO: 1579, and a CDRH3 of SEQ ID NO: 1580, and the VL comprises a CDRL1 of SEQ ID NO: 2265, a CDRL2 of SEQ ID NO: 2266, and a CDRL3 of SEQ ID NO: 2267; (gg) the VH comprises a CDRH1 of SEQ ID NO: 1587, a CDRH2 of SEQ ID NO: 1588, and a CDRH3 of SEQ ID NO: 1589, and the VL comprises a CDRL1 of SEQ ID NO: 2274, a CDRL2 of SEQ ID NO: 2275, and a CDRL3 of SEQ ID NO: 2276; (hh) the VH comprises a CDRH1 of SEQ ID NO: 1590, a CDRH2 of SEQ ID NO: 1591, and a CDRH3 of SEQ ID NO: 1592, and the VL comprises a CDRL1 of SEQ ID NO: 2277, a CDRL2 of SEQ ID NO: 2278, and a CDRL3 of SEQ ID NO: 2279; (ii) the VH comprises a CDRH1 of SEQ ID NO: 1593, a CDRH2 of SEQ ID NO: 1594, and a CDRH3 of SEQ ID NO: 1595, and the VL comprises a CDRL1 of SEQ ID NO: 2280, a CDRL2 of SEQ ID NO: 2281, and a CDRL3 of SEQ ID NO: 2282; (jj) the VH comprises a CDRH1 of SEQ ID NO: 1596, a CDRH2 of SEQ ID NO: 1597, and a CDRH3 of SEQ ID NO: 1598, and the VL comprises a CDRL1 of SEQ ID NO: 2283, a CDRL2 of SEQ ID NO: 2284, and a CDRL3 of SEQ ID NO: 2285; (kk) the VH comprises a CDRH1 of SEQ ID NO: 1599, a CDRH2 of SEQ ID NO: 1560, and a CDRH3 of SEQ ID NO: 1561, and the VL comprises a CDRL1 of SEQ ID NO: 2286, a CDRL2 of SEQ ID NO: 2287, and a CDRL3 of SEQ ID NO: 2288; (11) the VH comprises a CDRH1 of SEQ ID NO: 1602, a CDRH2 of SEQ ID NO: 1603, and a CDRH3 of SEQ ID NO: 1604, and the VL comprises a CDRL1 of SEQ ID NO: 2289, a CDRL2 of SEQ ID NO: 2290, and a CDRL3 of SEQ ID NO: 2291; (mm) the VH comprises a CDRH1 of SEQ ID NO: 1605, a CDRH2 of SEQ ID NO: 1606, and a CDRH3 of SEQ ID NO: 1607, and the VL comprises a CDRL1 of SEQ ID NO: 2292, a CDRL2 of SEQ ID NO: 2293, and a CDRL3 of SEQ ID NO: 2294; (nn) the VH comprises a CDRH1 of SEQ ID NO: 1608, a CDRH2 of SEQ ID NO: 1609, and a CDRH3 of SEQ ID NO: 1610, and the VL comprises a CDRL1 of SEQ ID NO: 2295, a CDRL2 of SEQ ID NO: 2296, and a CDRL3 of SEQ ID NO: 2297; (oo) the VH comprises a CDRH1 of SEQ ID NO: 1611, a CDRH2 of SEQ ID NO: 1612, and a CDRH3 of SEQ ID NO: 1613, and the VL comprises a CDRL1 of SEQ ID NO: 2298, a CDRL2 of SEQ ID NO: 2299, and a CDRL3 of SEQ ID NO: 2300; (pp) the VH comprises a CDRH1 of SEQ ID NO: 1614, a CDRH2 of SEQ ID NO: 1615, and a CDRH3 of SEQ ID NO: 1616, and the VL comprises a CDRL1 of SEQ ID NO: 2301, a CDRL2 of SEQ ID NO: 2302, and a CDRL3 of SEQ ID NO: 2303; (qq) the VH comprises a CDRH1 of SEQ ID NO: 1617, a CDRH2 of SEQ ID NO: 1618, and a CDRH3 of SEQ ID NO: 1619, and the VL comprises a CDRL1 of SEQ ID NO: 2304, a CDRL2 of SEQ ID NO: 2305, and a CDRL3 of SEQ ID NO: 2306; (rr) the VH comprises a CDRH1 of SEQ ID NO: 1626, a CDRH2 of SEQ ID NO: 1627, and a CDRH3 of SEQ ID NO: 1628, and the VL comprises a CDRL1 of SEQ ID NO: 2313, a CDRL2 of SEQ ID NO: 2314, and a CDRL3 of SEQ ID NO: 2315; (ss) the VH comprises a CDRH1 of SEQ ID NO: 1629, a CDRH2 of SEQ ID NO: 1630, and a CDRH3 of SEQ ID NO: 1631, and the VL comprises a CDRL1 of SEQ ID NO: 2316, a CDRL2 of SEQ ID NO: 2317, and a CDRL3 of SEQ ID NO: 2318; (tt) the VH comprises a CDRH1 of SEQ ID NO: 1632, a CDRH2 of SEQ ID NO: 1633, and a CDRH3 of SEQ ID NO: 1634, and the VL comprises a CDRL1 of SEQ ID NO: 2319, a CDRL2 of SEQ ID NO: 2320, and a CDRL3 of SEQ ID NO: 2321; (uu) the VH comprises a CDRH1 of SEQ ID NO: 1635, a CDRH2 of SEQ ID NO: 1636, and a CDRH3 of SEQ ID NO: 1637, and the VL comprises a CDRL1 of SEQ ID NO: 2322, a CDRL2 of SEQ ID NO: 2323, and a CDRL3 of SEQ ID NO: 2324; (vv) the VH comprises a CDRH1 of SEQ ID NO: 1638, a CDRH2 of SEQ ID NO: 1639, and a CDRH3 of SEQ ID NO: 1640, and the VL comprises a CDRL1 of SEQ ID NO: 2325, a CDRL2 of SEQ ID NO: 2326, and a CDRL3 of SEQ ID NO: 2327; (ww) the VH comprises a CDRH1 of SEQ ID NO: 1641, a CDRH2 of SEQ ID NO: 1642, and a CDRH3 of SEQ ID NO: 1643, and the VL comprises a CDRL1 of SEQ ID NO: 2328, a CDRL2 of SEQ ID NO: 2329, and a CDRL3 of SEQ ID NO: 2330; (xx) the VH comprises a CDRH1 of SEQ ID NO: 1644, a CDRH2 of SEQ ID NO: 1645, and a CDRH3 of SEQ ID NO: 1646, and the VL comprises a CDRL1 of SEQ ID NO: 2331, a CDRL2 of SEQ ID NO: 2332, and a CDRL3 of SEQ ID NO: 2333; (yy) the VH comprises a CDRH1 of SEQ ID NO: 1647, a CDRH2 of SEQ ID NO: 1648, and a CDRH3 of SEQ ID NO: 1649, and the VL comprises a CDRL1 of SEQ ID NO: 2334, a CDRL2 of SEQ ID NO: 2335, and a CDRL3 of SEQ ID NO: 2336; (zz) the VH comprises a CDRH1 of SEQ ID NO: 1650, a CDRH2 of SEQ ID NO: 1651, and a CDRH3 of SEQ ID NO: 1652, and the VL comprises a CDRL1 of SEQ ID NO: 2337, a CDRL2 of SEQ ID NO: 2338, and a CDRL3 of SEQ ID NO: 2339; (aaa) the VH comprises a CDRH1 of SEQ ID NO: 1653, a CDRH2 of SEQ ID NO: 1654, and a CDRH3 of SEQ ID NO: 1655, and the VL comprises a CDRL1 of SEQ ID NO: 2340, a CDRL2 of SEQ ID NO: 2341, and a CDRL3 of SEQ ID NO: 2342; (bbb) the VH comprises a CDRH1 of SEQ ID NO: 1656, a CDRH2 of SEQ ID NO: 1657, and a CDRH3 of SEQ ID NO: 1658, and the VL comprises a CDRL1 of SEQ ID NO: 2343, a CDRL2 of SEQ ID NO: 2344, and a CDRL3 of SEQ ID NO: 2345; or (ccc) the VH comprises a CDRH1 of SEQ ID NO: 1659, a CDRH2 of SEQ ID NO: 1660, and a CDRH3 of SEQ ID NO: 1661, and the VL comprises a CDRL1 of SEQ ID NO: 2346, a CDRL2 of SEQ ID NO: 2347, and a CDRL3 of SEQ ID NO: 2348.

[0717] Embodiment 46. The method of any one of embodiments 33-45, wherein the wherein the second antigen recognition domain comprises a scFv comprising a VH and a VL, wherein: (a) the VH comprises SEQ ID NO: 82 and the VL comprises SEQ ID NO: 84; (b) the VH comprises SEQ ID NO: 21 and the VL comprises SEQ ID NO: 23; (c) the VH comprises SEQ ID NO: 31 and the VL comprises SEQ ID NO: 33; (d) the VH comprises SEQ ID NO: 41 and the VL comprises SEQ ID NO: 43; (e) the VH comprises SEQ ID NO: 51 and the VL comprises SEQ ID NO: 53; (f) the VH comprises SEQ ID NO: 61 and the VL comprises SEQ ID NO: 63; (g) the VH comprises SEQ ID NO: 693 and the VL comprises SEQ ID NO: 66; (h) the VH comprises SEQ ID NO: 694 and the VL comprises SEQ ID NO: 69; (i) the VH comprises SEQ ID NO: 695 and the VL comprises SEQ ID NO: 72; (j) the VH comprises SEQ ID NO: 74 and the VL comprises SEQ ID NO: 76; (k) the VH comprises SEQ ID NO: 78 and the VL comprises SEQ ID NO: 80; (1) the VH comprises SEQ ID NO: 11 and the VL comprises SEQ ID NO: 13; (m) the VH comprises SEQ ID NO: 92 and the VL comprises SEQ ID NO: 94; (n) the VH comprises SEQ ID NO: 102 and the VL comprises SEQ ID NO: 103; (o) the VH comprises SEQ ID NO: 104 and the VL comprises SEQ ID NO: 105; (p) the VH comprises SEQ ID NO: 712 and the VL comprises SEQ ID NO: 713; (q) the VH comprises SEQ ID NO: 714 and the VL comprises SEQ ID NO: 715; (r) the VH comprises SEQ ID NO: 716 and the VL comprises SEQ ID NO: 717; (s) the VH comprises SEQ ID NO: 718 and the VL comprises SEQ ID NO: 719; (t) the VH comprises SEQ ID NO: 720 and the VL comprises SEQ ID NO: 721; (u) the VH comprises SEQ ID NO: 722 and the VL comprises SEQ ID NO: 723; (v) the VH comprises SEQ ID NO: 724 and the VL comprises SEQ ID NO: 725; (w) the VH comprises SEQ ID NO: 948 and the VL comprises SEQ ID NO: 949; (x) the VH comprises SEQ ID NO: 950 and the VL comprises SEQ ID NO: 951; (y) the VH comprises SEQ ID NO: 952 and the VL comprises SEQ ID NO: 953; (z) the VH comprises SEQ ID NO: 954 and the VL comprises SEQ ID NO: 955; (aa) the VH comprises SEQ ID NO: 958 and the VL comprises SEQ ID NO: 959; (bb) the VH comprises SEQ ID NO: 960 and the VL comprises SEQ ID NO: 961; (cc) the VH comprises SEQ ID NO: 964 and the VL comprises SEQ ID NO: 965; (dd) the VH comprises SEQ ID NO: 966 and the VL comprises SEQ ID NO: 967; (ee) the VH comprises SEQ ID NO: 968 and the VL comprises SEQ ID NO: 969; (ff) the VH comprises SEQ ID NO: 970 and the VL comprises SEQ ID NO: 971; (gg) the VH comprises SEQ ID NO: 972 and the VL comprises SEQ ID NO: 973; (hh) the VH comprises SEQ ID NO: 974 and the VL comprises SEQ ID NO: 975; (ii) the VH comprises SEQ ID NO: 976 and the VL comprises SEQ ID NO: 977; (jj) the VH comprises SEQ ID NO: 980 and the VL comprises SEQ ID NO: 981; (kk) the VH comprises SEQ ID NO: 982 and the VL comprises SEQ ID NO: 983; (11) the VH comprises SEQ ID NO: 984 and the VL comprises SEQ ID NO: 985; (mm) the VH comprises SEQ ID NO: 990 and the VL comprises SEQ ID NO: 991; (nn) the VH comprises SEQ ID NO: 992 and the VL comprises SEQ ID NO: 993; (oo) the VH comprises SEQ ID NO: 994 and the VL comprises SEQ ID NO: 995; (pp) the VH comprises SEQ ID NO: 996 and the VL comprises SEQ ID NO: 997; (qq) the VH comprises SEQ ID NO: 998 and the VL comprises SEQ ID NO: 999; (rr) the VH comprises SEQ ID NO: 1000 and the VL comprises SEQ ID NO: 1001; (ss) the VH comprises SEQ ID NO: 1002 and the VL comprises SEQ ID NO: 1003; (tt) the VH comprises SEQ ID NO: 1004 and the VL comprises SEQ ID NO: 1005; (uu) the VH comprises SEQ ID NO: 1006 and the VL comprises SEQ ID NO: 1007; (vv) the VH comprises SEQ ID NO: 1008 and the VL comprises SEQ ID NO: 1009; (ww) the VH comprises SEQ ID NO: 1010 and the VL comprises SEQ ID NO: 1011; (xx) the VH comprises SEQ ID NO: 1016 and the VL comprises SEQ ID NO: 1017; (yy) the VH comprises SEQ ID NO: 1018 and the VL comprises SEQ ID NO: 1019; (zz) the VH comprises SEQ ID NO: 1020 and the VL comprises SEQ ID NO: 1021; (aaa) the VH comprises SEQ ID NO: 1022 and the VL comprises SEQ ID NO: 1023; (bbb) the VH comprises SEQ ID NO: 1024 and the VL comprises SEQ ID NO: 1025; (ccc) the VH comprises SEQ ID NO: 1026 and the VL comprises SEQ ID NO: 1027; (ddd) the VH comprises SEQ ID NO: 1028 and the VL comprises SEQ ID NO: 1029; (eee) the VH comprises SEQ ID NO: 1030 and the VL comprises SEQ ID NO: 1031; (fff) the VH comprises SEQ ID NO: 1032 and the VL comprises SEQ ID NO: 1033; (ggg) the VH comprises SEQ ID NO: 1034 and the VL comprises SEQ ID NO: 1035; (hhh) the VH comprises SEQ ID NO: 1036 and the VL comprises SEQ ID NO: 1037; or (iii) the VH comprises SEQ ID NO: 1038 and the VL comprises SEQ ID NO: 1039.

[0718] Embodiment 47. The method of any one of embodiments 33-46, wherein the second antigen recognition domain comprises a single domain antibody fragment, an adnectin peptide, an affibody, an afflilin, an affimer, an affitin, an alphabody, an anticalin, an avimer, a DARPin (Designed Ankyrin Repeat Protein), a Fynomer, a Kunitz domain peptide, a monobody, a centyrin, an aptamer, a T cell receptor (TCR)-like antibody, a single chain TCR (scTCR), or a portion of any of the foregoing.

[0719] Embodiment 48. The method of any one of embodiments 33-44, wherein the second antigen recognition domain comprises a human CD27 extracellular domain.

[0720] Embodiment 49. The method of embodiment 48, wherein the human CD27 extracellular domain comprises the amino acid sequence of SEQ ID NO: 8.

[0721] Embodiment 50. The method of embodiment 48 or 49, wherein the human CD27 extracellular domain comprises a mutation.

[0722] Embodiment 51. The method of embodiment 50, wherein the mutation reduces shedding of the human CD27 extracellular domain.

[0723] Embodiment 52. The method of any one of embodiments 33-51, wherein the extracellular domain comprises a hinge.

[0724] Embodiment 53. The method of embodiment 52, wherein the hinge comprises (a) a portion of the extracellular region of CD8, CD8alpha, CD4, CD28, 4-1BB, or IgG; and/or (b) a human immunoglobulin CH2 region, a human immunoglobulin CH3 region, or both a human immunoglobulin CH2 region and a human immunoglobulin CH3 region.

[0725] Embodiment 54. The method of embodiment 52 or 53, wherein the hinge comprises a human immunoglobulin CH2 region and wherein the human immunoglobulin CH2 region is an IgG1, IgG2 or IgG4 immunoglobulin CH2 region.

[0726] Embodiment 55. The method of embodiment 52 or 53, wherein the hinge comprises a human immunoglobulin CH3 region and wherein the human immunoglobulin CH3 region is an IgG1, IgG2 or IgG4 immunoglobulin CH3 region.

[0727] Embodiment 56. The method of any one of embodiments 33-55, wherein the transmembrane domain comprises a CD8, CD16, CD27, CD28, 2B4, NKG2D, NKp44, NKp46, NKp30, NKp80, DNAM-1, CD3 zeta, CD3 epsilon, CD3 gamma, CD3 delta, CD45, CD4, CD5, CD9, CD22, CD33, CD37, CD64, CD80, CD86, CD134, CD137, CD154, ICOS/CD278, GITR/CD357, DAP10, DAP12 or erythropoietin receptor transmembrane domain, a portion of any of the foregoing, or a combination of any of the foregoing.

[0728] Embodiment 57. The method of any one of embodiments 33-56, wherein the intracellular domain comprises a costimulatory domain.

[0729] Embodiment 58. The method of any one of embodiments 33-57, wherein the intracellular domain comprises two or three costimulatory domains.

[0730] Embodiment 59. The method of embodiment 57 or 58, wherein the costimulatory domain comprises a CD28, 4-1BB, DAP10, DAP12, 2B4, OX40, OX40L, ICOS, or CD27 costimulatory domain, or a portion of any of the foregoing.

[0731] Embodiment 60. The method of any one of embodiments 33-59, wherein the intracellular domain comprises an activation domain.

[0732] Embodiment 61. The method of embodiment 60, wherein the activation domain comprises a DAP12, FCER1G, FCGR2 Å, CD3zeta activation domain, or a portion of any of the foregoing.

[0733] Embodiment 62. The method of embodiment 61, wherein the activation domain comprises the CD3zeta activation domain, or the portion thereof, and wherein the CD3zeta activation domain or the portion thereof, comprises a mutation in an ITAM domain.

[0734] Embodiment 63. The method of embodiment 62, wherein the mutation in the ITAM domain of the CD3zeta activation domain comprises point mutations of each of the two tyrosine residues in one or more of the ITAM1, ITAM2, or ITAM3 domains to a phenylalanine residue.

[0735] Embodiment 64. The method of embodiment 63, wherein the mutation in the ITAM domain of the CD3zeta activation domain comprises a deletion of one or more of the ITAM1, ITAM2, or ITAM3 domains.

[0736] Embodiment 65. The method of any one of embodiments 33-64, further comprising (e) contacting the population of NK cells with at least one (e.g., one, two, three, or more) additional polynucleotide encoding an additional exogenous polypeptide.

[0737] Embodiment 66. The method of embodiment 65, wherein a single nucleic acid molecule comprises the first polynucleotide and the at least one additional polynucleotide.

[0738] Embodiment 67. The method of embodiment 65, wherein a first nucleic acid molecule comprises the first polynucleotide and a second nucleic acid molecule comprises the at least one additional polynucleotide.

[0739] Embodiment 68. The method of any one of embodiments 65-67, wherein the additional exogenous polypeptide comprises a cytokine, chemokine, ligand, receptor, monoclonal antibody, bispecific T cell engager, peptide or enzyme, a subunit or a portion of the foregoing, or any combination of the foregoing.

[0740] Embodiment 69. The method of embodiment 68, wherein the additional exogenous polypeptide comprises a cytokine and wherein the cytokine comprises IL-15, membrane-bound IL-15 (mbIL-15), IL-2, membrane-bound IL-2, IL-12, membrane-bound IL-12, IL-18, membrane-bound IL-18, IL-21, membrane-bound IL-21, p40, LIGHT, CD40L, FLT3L, 4-1BBL, or FASL.

[0741] Embodiment 70. The method of any one of embodiments 65-67, wherein the additional exogenous polypeptide comprises IL-15RA or a fusion protein comprising IL-15 and IL-15RA.

[0742] Embodiment 71. The method of any one of embodiments 65-67, wherein the additional exogenous polypeptide is a tethered IL-21, a tethered IL-12, or a tethered IL-18.

[0743] Embodiment 72. The method of any one of embodiments 65-67, wherein the at least one additional polynucleotide encodes a first additional exogenous polypeptide and a second additional exogenous polypeptide.

[0744] Embodiment 73. The method of embodiment 72, wherein: (a) the first additional exogenous polypeptide comprises mbIL-15 and the second additional exogenous polypeptide comprises IL-15RA; or (b) the first additional exogenous polypeptide comprises soluble IL-15 and the second additional exogenous polypeptide comprises IL-15RA.

[0745] Embodiment 74. The method of embodiment 68, wherein the additional exogenous polypeptide comprises a receptor and the receptor comprises CSF-1R, a CXC chemokine receptor (e.g., CXCR1, CXCR2, CXCR3, CXCR4, CXCR5, CXCR6, or CXCR7), a CC chemokine receptor (e.g., CCR1, CCR2, CCR3, CCR4, CCR5, CCR6, CCR7, CCR8, CCR9, CCR10, or CCR11), a CX3C chemokine receptor (e.g., CX3CR1), a XC chemokine receptor (e.g., XCR1), or a chemokine-binding fragment thereof.

[0746] Embodiment 75. The method of embodiment 68, wherein the additional exogenous polypeptide is an enzyme and the enzyme comprises heparanase.

[0747] Embodiment 76. The method of any one of embodiments 65-67, wherein the additional exogenous polypeptide is a protein that overcomes immunosuppression of the tumor microenvironment.

[0748] Embodiment 77. The method of embodiment 76, wherein the protein comprises a TGFbeta signal converter.

[0749] Embodiment 78. The method of embodiment 77, wherein the TGFbeta signal converter comprises a TGFbeta receptor extracellular domain and an NK cell intracellular domain.

[0750] Embodiment 79. The method of embodiment 78, wherein the NK cell intracellular domain comprises DAP10 or DAP12.

[0751] Embodiment 80. The method of embodiment 76, wherein the protein comprises a TGFbeta decoy receptor.

[0752] Embodiment 81. The method of any one of embodiments 65-67, wherein the additional exogenous polypeptide comprises a second CAR, comprising an antigen recognition domain that specifically binds an antigen other than human CD70.

[0753] Embodiment 82. The method of embodiment 80, wherein the antigen other than human CD70 is CAIX, CD19, CD20, CD22, CD33, CD37, CD79a, CD79b, CD96, CD123, CD138, CLL-1, CXCR5, BCMA, FOLR2, FCRL5, FLT3, GPRC5D, HAVCR1, Her2, mesothelin, MUC16, EGFR, EGFRVIII, IL13Ra2, Trop2, GPC3, FOLR1, or GD2.

[0754] Embodiment 83. The method of any one of embodiments 65-67, wherein the additional exogenous polypeptide comprises a safety switch protein.

[0755] Embodiment 84. The method of any one of embodiments 65-83, wherein step (e) comprises use of a viral vector, electroporation, a transposon/transposase system, a lipid nanoparticle or a charge-altering releasable transporter.

[0756] Embodiment 85. The method of any one of embodiments 1-84, further comprising linking an additional exogenous polypeptide to at least one NK cell of the NK cell population by chemical conjugation or using a sortase enzyme.

[0757] Embodiment 86. A genetically engineered natural killer (NK) cell modified to have: a) a decreased level of total expressed CD70 polypeptide compared to the level of total expressed CD70 polypeptide in a wild-type NK cell, and/or b) a decreased level of surface expressed CD70 polypeptide compared to the level of surface expressed CD70 in a wild-type NK cell.

[0758] Embodiment 87. The genetically engineered NK cell of embodiment 86, wherein the genetically engineered NK cell comprises a disrupted CD70 gene.

[0759] Embodiment 88. The genetically engineered NK cell of embodiment 86 and embodiment 87, wherein the genetically engineered NK cell comprises a knockout or knockdown of a CD70 gene.

[0760] Embodiment 89. The genetically engineered NK cell of any one of embodiments 86-88, wherein the genetically engineered NK cell comprises at least about 10% less, about 20% less, about 30% less, about 40% less, about 50% less, about 60% less, about 70% less, about 80% less, or about 90% less of surface expressed CD70 polypeptide and/or total expressed CD70 polypeptide than the wild-type NK cell.

[0761] Embodiment 90. The genetically engineered NK cell of any one of embodiments 86-88, wherein the level of CD70 mRNA in the NK cell is reduced and wherein the level of CD70 mRNA is measured by Northern blot, quantitative PCR, or RNA sequencing.

[0762] Embodiment 91. The genetically engineered NK cell of any one of embodiments 86-90, wherein the level of CD70 polypeptide in the NK cell is reduced and wherein the level of CD70 polypeptide is measured by Western blot, ELISA, flow cytometry, or mass spectrometry.

[0763] Embodiment 92. The genetically engineered NK cell of any one of embodiments 86-91, wherein the genetically engineered NK cell comprises a siRNA that targets CD70 mRNA, a nucleic acid encoding a siRNA that targets CD70 mRNA, a shRNA that targets CD70 mRNA, or a nucleic acid encoding a shRNA that targets CD70 mRNA.

[0764] Embodiment 93. The genetically engineered NK cell of any one of embodiments 86-92, wherein the genetically engineered NK cell comprises a shRNA that targets CD70 mRNA or a nucleic acid encoding a shRNA that targets CD70 mRNA.

[0765] Embodiment 94. The genetically engineered NK cell of any one of embodiments 86-93, wherein the shRNA that targets CD70 mRNA comprises the nucleic acid sequence of any one of SEQ ID NOs: 2647-2652.

[0766] Embodiment 95. The genetically engineered NK cell of any one of embodiments 86-94, wherein the genetically engineered NK cell comprises an RNA guided endonuclease and a gRNA targeting a CD70 gene.

[0767] Embodiment 96. The genetically engineered NK cell of any one of embodiments 86-95, wherein the genetically engineered NK cell comprises a PEBL or a nucleic acid encoding a PEBL, wherein the PEBL comprises a first antigen recognition domain that specifically binds human CD70 and one or more of a localizing domain, an intracellular retention domain and an ER retention domain.

[0768] Embodiment 97. The genetically engineered NK cell of embodiment 96, wherein the first antigen recognition domain comprises a VH and a VL, wherein: (a) the VH comprises a CDRH1 of SEQ ID NO: 86, a CDRH2 of SEQ ID NO: 87, and a CDRH3 of SEQ ID NO: 88, and the VL comprises a CDRL1 of SEQ ID NO: 89, a CDRL2 of SEQ ID NO: 90, and a CDRL3 of SEQ ID NO: 91; (b) the VH comprises a CDRH1 of SEQ ID NO: 25, a CDRH2 of SEQ ID NO: 26, and a CDRH3 of SEQ ID NO: 27, and the VL comprises a CDRL1 of SEQ ID NO: 28, a CDRL2 of SEQ ID NO: 29, and a CDRL3 of SEQ ID NO: 30; (c) the VH comprises a CDRH1 of SEQ ID NO: 35, a CDRH2 of SEQ ID NO: 36, and a CDRH3 of SEQ ID NO: 37, and the VL comprises a CDRL1 of SEQ ID NO: 38, a CDRL2 of SEQ ID NO: 39, and a CDRL3 of SEQ ID NO: 40; (d) the VH comprises a CDRH1 of SEQ ID NO: 45, a CDRH2 of SEQ ID NO: 46, and a CDRH3 of SEQ ID NO: 47, and the VL comprises a CDRL1 of SEQ ID NO: 48, a CDRL2 of SEQ ID NO: 49, and a CDRL3 of SEQ ID NO: 50; (e) the VH comprises a CDRH1 of SEQ ID NO: 55, a CDRH2 of SEQ ID NO: 56, and a CDRH3 of SEQ ID NO: 57, and the VL comprises a CDRL1 of SEQ ID NO: 58, a CDRL2 of SEQ ID NO: 59, and a CDRL3 of SEQ ID NO: 60; (f) the VH comprises a CDRH1 of SEQ ID NO: 15, a CDRH2 of SEQ ID NO: 16, and a CDRH3 of SEQ ID NO: 17, and the VL comprises a CDRL1 of SEQ ID NO: 18, a CDRL2 of SEQ ID NO: 19, and a CDRL3 of SEQ ID NO: 20; (g) the VH comprises a CDRH1 of SEQ ID NO: 96, a CDRH2 of SEQ ID NO: 97, and a CDRH3 of SEQ ID NO: 98, and the VL comprises a CDRL1 of SEQ ID NO: 99, a CDRL2 of SEQ ID NO: 100, and a CDRL3 of SEQ ID NO: 101; (h) the VH comprises a CDRH1 of SEQ ID NO: 196, a CDRH2 of SEQ ID NO: 197, and a CDRH3 of SEQ ID NO: 198, and the VL comprises a CDRL1 of SEQ ID NO: 478, a CDRL2 of SEQ ID NO: 479, and a CDRL3 of SEQ ID NO: 480; (i) the VH comprises a CDRH1 of SEQ ID NO: 202, a CDRH2 of SEQ ID NO: 203, and a CDRH3 of SEQ ID NO: 204, and the VL comprises a CDRL1 of SEQ ID NO: 481, a CDRL2 of SEQ ID NO: 482, and a CDRL3 of SEQ ID NO: 483; (j) the VH comprises a CDRH1 of SEQ ID NO: 1170, a CDRH2 of SEQ ID NO: 1171, and a CDRH3 of SEQ ID NO: 1172, and the VL comprises a CDRL1 of SEQ ID NO: 1857, a CDRL2 of SEQ ID NO: 1858, and a CDRL3 of SEQ ID NO: 1859; (k) the VH comprises a CDRH1 of SEQ ID NO: 1173, a CDRH2 of SEQ ID NO: 1174, and a CDRH3 of SEQ ID NO: 1175, and the VL comprises a CDRL1 of SEQ ID NO: 1860, a CDRL2 of SEQ ID NO: 1861, and a CDRL3 of SEQ ID NO: 1862; (1) the VH comprises a CDRH1 of SEQ ID NO: 1176, a CDRH2 of SEQ ID NO: 1177, and a CDRH3 of SEQ ID NO: 1178, and the VL comprises a CDRL1 of SEQ ID NO: 1863, a CDRL2 of SEQ ID NO: 1864, and a CDRL3 of SEQ ID NO: 1865; (m) the VH comprises a CDRH1 of SEQ ID NO: 1179, a CDRH2 of SEQ ID NO: 1180, and a CDRH3 of SEQ ID NO: 1181, and the VL comprises a CDRL1 of SEQ ID NO: 1866, a CDRL2 of SEQ ID NO: 1867, and a CDRL3 of SEQ ID NO: 1868; (n) the VH comprises a CDRH1 of SEQ ID NO: 1182, a CDRH2 of SEQ ID NO: 1183, and a CDRH3 of SEQ ID NO: 1184, and the VL comprises a CDRL1 of SEQ ID NO: 1869, a CDRL2 of SEQ ID NO: 1870, and a CDRL3 of SEQ ID NO: 1871; (o) the VH comprises a CDRH1 of SEQ ID NO: 1185, a CDRH2 of SEQ ID NO: 1186, and a CDRH3 of SEQ ID NO: 1187, and the VL comprises a CDRL1 of SEQ ID NO: 1872, a CDRL2 of SEQ ID NO: 1873, and a CDRL3 of SEQ ID NO: 1874; (p) the VH comprises a CDRH1 of SEQ ID NO: 1188, a CDRH2 of SEQ ID NO: 1189, and a CDRH3 of SEQ ID NO: 1190, and the VL comprises a CDRL1 of SEQ ID NO: 1875, a CDRL2 of SEQ ID NO: 1876, and a CDRL3 of SEQ ID NO: 1877; (q) the VH comprises a CDRH1 of SEQ ID NO: 1524, a CDRH2 of SEQ ID NO: 1525, and a CDRH3 of SEQ ID NO: 1526, and the VL comprises a CDRL1 of SEQ ID NO: 2211, a CDRL2 of SEQ ID NO: 2212, and a CDRL3 of SEQ ID NO: 2213; (r) the VH comprises a CDRH1 of SEQ ID NO: 1527, a CDRH2 of SEQ ID NO: 1528, and a CDRH3 of SEQ ID NO: 1529, and the VL comprises a CDRL1 of SEQ ID NO: 2214, a CDRL2 of SEQ ID NO: 2215, and a CDRL3 of SEQ ID NO: 2216; (s) the VH comprises a CDRH1 of SEQ ID NO: 1530, a CDRH2 of SEQ ID NO: 1531, and a CDRH3 of SEQ ID NO: 1532, and the VL comprises a CDRL1 of SEQ ID NO: 2217, a CDRL2 of SEQ ID NO: 2218, and a CDRL3 of SEQ ID NO: 2219; (t) the VH comprises a CDRH1 of SEQ ID NO: 1533, a CDRH2 of SEQ ID NO: 1534, and a CDRH3 of SEQ ID NO: 1535, and the VL comprises a CDRL1 of SEQ ID NO: 2220, a CDRL2 of SEQ ID NO: 2221, and a CDRL3 of SEQ ID NO: 2222; (u) the VH comprises a CDRH1 of SEQ ID NO: 1539, a CDRH2 of SEQ ID NO: 1540, and a CDRH3 of SEQ ID NO: 1541, and the VL comprises a CDRL1 of SEQ ID NO: 2226, a CDRL2 of SEQ ID NO: 2227, and a CDRL3 of SEQ ID NO: 2228; (v) the VH comprises a CDRH1 of SEQ ID NO: 1542, a CDRH2 of SEQ ID NO: 1543, and a CDRH3 of SEQ ID NO: 1544, and the VL comprises a CDRL1 of SEQ ID NO: 2229, a CDRL2 of SEQ ID NO: 2230, and a CDRL3 of SEQ ID NO: 2231; (w) the VH comprises a CDRH1 of SEQ ID NO: 1548, a CDRH2 of SEQ ID NO: 1549, and a CDRH3 of SEQ ID NO: 1550, and the VL comprises a CDRL1 of SEQ ID NO: 2235, a CDRL2 of SEQ ID NO: 2236, and a CDRL3 of SEQ ID NO: 2237; (x) the VH comprises a CDRH1 of SEQ ID NO: 1551, a CDRH2 of SEQ ID NO: 1552, and a CDRH3 of SEQ ID NO: 1553, and the VL comprises a CDRL1 of SEQ ID NO: 2238, a CDRL2 of SEQ ID NO: 2239, and a CDRL3 of SEQ ID NO: 2240; (y) the VH comprises a CDRH1 of SEQ ID NO: 1554, a CDRH2 of SEQ ID NO: 1555, and a CDRH3 of SEQ ID NO: 1556, and the VL comprises a CDRL1 of SEQ ID NO: 2241, a CDRL2 of SEQ ID NO: 2242, and a CDRL3 of SEQ ID NO: 2243; (z) the VH comprises a CDRH1 of SEQ ID NO: 1557, a CDRH2 of SEQ ID NO: 1558, and a CDRH3 of SEQ ID NO: 1559, and the VL comprises a CDRL1 of SEQ ID NO: 2244, a CDRL2 of SEQ ID NO: 2245, and a CDRL3 of SEQ ID NO: 2246; (aa) the VH comprises a CDRH1 of SEQ ID NO: 1560, a CDRH2 of SEQ ID NO: 1561, and a CDRH3 of SEQ ID NO: 1562, and the VL comprises a CDRL1 of SEQ ID NO: 2247, a CDRL2 of SEQ ID NO: 2248, and a CDRL3 of SEQ ID NO: 2249; (bb) the VH comprises a CDRH1 of SEQ ID NO: 1563, a CDRH2 of SEQ ID NO: 1564, and a CDRH3 of SEQ ID NO: 1565, and the VL comprises a CDRL1 of SEQ ID NO: 2250, a CDRL2 of SEQ ID NO: 2251, and a CDRL3 of SEQ ID NO: 2252; (cc) the VH comprises a CDRH1 of SEQ ID NO: 1566, a CDRH2 of SEQ ID NO: 1567, and a CDRH3 of SEQ ID NO: 1568, and the VL comprises a CDRL1 of SEQ ID NO: 2253, a CDRL2 of SEQ ID NO: 2254, and a CDRL3 of SEQ ID NO: 2255; (dd) the VH comprises a CDRH1 of SEQ ID NO: 1572, a CDRH2 of SEQ ID NO: 1573, and a CDRH3 of SEQ ID NO: 1574, and the VL comprises a CDRL1 of SEQ ID NO: 2259, a CDRL2 of SEQ ID NO: 2260, and a CDRL3 of SEQ ID NO: 2261; (ee) the VH comprises a CDRH1 of SEQ ID NO: 1575, a CDRH2 of SEQ ID NO: 1576, and a CDRH3 of SEQ ID NO: 1577, and the VL comprises a CDRL1 of SEQ ID NO: 2262, a CDRL2 of SEQ ID NO: 2263, and a CDRL3 of SEQ ID NO: 2264; (ff) the VH comprises a CDRH1 of SEQ ID NO: 1578, a CDRH2 of SEQ ID NO: 1579, and a CDRH3 of SEQ ID NO: 1580, and the VL comprises a CDRL1 of SEQ ID NO: 2265, a CDRL2 of SEQ ID NO: 2266, and a CDRL3 of SEQ ID NO: 2267; (gg) the VH comprises a CDRH1 of SEQ ID NO: 1587, a CDRH2 of SEQ ID NO: 1588, and a CDRH3 of SEQ ID NO: 1589, and the VL comprises a CDRL1 of SEQ ID NO: 2274, a CDRL2 of SEQ ID NO: 2275, and a CDRL3 of SEQ ID NO: 2276; (hh) the VH comprises a CDRH1 of SEQ ID NO: 1590, a CDRH2 of SEQ ID NO: 1591, and a CDRH3 of SEQ ID NO: 1592, and the VL comprises a CDRL1 of SEQ ID NO: 2277, a CDRL2 of SEQ ID NO: 2278, and a CDRL3 of SEQ ID NO: 2279; (ii) the VH comprises a CDRH1 of SEQ ID NO: 1593, a CDRH2 of SEQ ID NO: 1594, and a CDRH3 of SEQ ID NO: 1595, and the VL comprises a CDRL1 of SEQ ID NO: 2280, a CDRL2 of SEQ ID NO: 2281, and a CDRL3 of SEQ ID NO: 2282; (jj) the VH comprises a CDRH1 of SEQ ID NO: 1596, a CDRH2 of SEQ ID NO: 1597, and a CDRH3 of SEQ ID NO: 1598, and the VL comprises a CDRL1 of SEQ ID NO: 2283, a CDRL2 of SEQ ID NO: 2284, and a CDRL3 of SEQ ID NO: 2285; (kk) the VH comprises a CDRH1 of SEQ ID NO: 1599, a CDRH2 of SEQ ID NO: 1560, and a CDRH3 of SEQ ID NO: 1561, and the VL comprises a CDRL1 of SEQ ID NO: 2286, a CDRL2 of SEQ ID NO: 2287, and a CDRL3 of SEQ ID NO: 2288; (11) the VH comprises a CDRH1 of SEQ ID NO: 1602, a CDRH2 of SEQ ID NO: 1603, and a CDRH3 of SEQ ID NO: 1604, and the VL comprises a CDRL1 of SEQ ID NO: 2289, a CDRL2 of SEQ ID NO: 2290, and a CDRL3 of SEQ ID NO: 2291; (mm) the VH comprises a CDRH1 of SEQ ID NO: 1605, a CDRH2 of SEQ ID NO: 1606, and a CDRH3 of SEQ ID NO: 1607, and the VL comprises a CDRL1 of SEQ ID NO: 2292, a CDRL2 of SEQ ID NO: 2293, and a CDRL3 of SEQ ID NO: 2294; (nn) the VH comprises a CDRH1 of SEQ ID NO: 1608, a CDRH2 of SEQ ID NO: 1609, and a CDRH3 of SEQ ID NO: 1610, and the VL comprises a CDRL1 of SEQ ID NO: 2295, a CDRL2 of SEQ ID NO: 2296, and a CDRL3 of SEQ ID NO: 2297; (oo) the VH comprises a CDRH1 of SEQ ID NO: 1611, a CDRH2 of SEQ ID NO: 1612, and a CDRH3 of SEQ ID NO: 1613, and the VL comprises a CDRL1 of SEQ ID NO: 2298, a CDRL2 of SEQ ID NO: 2299, and a CDRL3 of SEQ ID NO: 2300; (pp) the VH comprises a CDRH1 of SEQ ID NO: 1614, a CDRH2 of SEQ ID NO: 1615, and a CDRH3 of SEQ ID NO: 1616, and the VL comprises a CDRL1 of SEQ ID NO: 2301, a CDRL2 of SEQ ID NO: 2302, and a CDRL3 of SEQ ID NO: 2303; (qq) the VH comprises a CDRH1 of SEQ ID NO: 1617, a CDRH2 of SEQ ID NO: 1618, and a CDRH3 of SEQ ID NO: 1619, and the VL comprises a CDRL1 of SEQ ID NO: 2304, a CDRL2 of SEQ ID NO: 2305, and a CDRL3 of SEQ ID NO: 2306; (rr) the VH comprises a CDRH1 of SEQ ID NO: 1626, a CDRH2 of SEQ ID NO: 1627, and a CDRH3 of SEQ ID NO: 1628, and the VL comprises a CDRL1 of SEQ ID NO: 2313, a CDRL2 of SEQ ID NO: 2314, and a CDRL3 of SEQ ID NO: 2315; (ss) the VH comprises a CDRH1 of SEQ ID NO: 1629, a CDRH2 of SEQ ID NO: 1630, and a CDRH3 of SEQ ID NO: 1631, and the VL comprises a CDRL1 of SEQ ID NO: 2316, a CDRL2 of SEQ ID NO: 2317, and a CDRL3 of SEQ ID NO: 2318; (tt) the VH comprises a CDRH1 of SEQ ID NO: 1632, a CDRH2 of SEQ ID NO: 1633, and a CDRH3 of SEQ ID NO: 1634, and the VL comprises a CDRL1 of SEQ ID NO: 2319, a CDRL2 of SEQ ID NO: 2320, and a CDRL3 of SEQ ID NO: 2321; (uu) the VH comprises a CDRH1 of SEQ ID NO: 1635, a CDRH2 of SEQ ID NO: 1636, and a CDRH3 of SEQ ID NO: 1637, and the VL comprises a CDRL1 of SEQ ID NO: 2322, a CDRL2 of SEQ ID NO: 2323, and a CDRL3 of SEQ ID NO: 2324; (vv) the VH comprises a CDRH1 of SEQ ID NO: 1638, a CDRH2 of SEQ ID NO: 1639, and a CDRH3 of SEQ ID NO: 1640, and the VL comprises a CDRL1 of SEQ ID NO: 2325, a CDRL2 of SEQ ID NO: 2326, and a CDRL3 of SEQ ID NO: 2327; (ww) the VH comprises a CDRH1 of SEQ ID NO: 1641, a CDRH2 of SEQ ID NO: 1642, and a CDRH3 of SEQ ID NO: 1643, and the VL comprises a CDRL1 of SEQ ID NO: 2328, a CDRL2 of SEQ ID NO: 2329, and a CDRL3 of SEQ ID NO: 2330; (xx) the VH comprises a CDRH1 of SEQ ID NO: 1644, a CDRH2 of SEQ ID NO: 1645, and a CDRH3 of SEQ ID NO: 1646, and the VL comprises a CDRL1 of SEQ ID NO: 2331, a CDRL2 of SEQ ID NO: 2332, and a CDRL3 of SEQ ID NO: 2333; (yy) the VH comprises a CDRH1 of SEQ ID NO: 1647, a CDRH2 of SEQ ID NO: 1648, and a CDRH3 of SEQ ID NO: 1649, and the VL comprises a CDRL1 of SEQ ID NO: 2334, a CDRL2 of SEQ ID NO: 2335, and a CDRL3 of SEQ ID NO: 2336; (zz) the VH comprises a CDRH1 of SEQ ID NO: 1650, a CDRH2 of SEQ ID NO: 1651, and a CDRH3 of SEQ ID NO: 1652, and the VL comprises a CDRL1 of SEQ ID NO: 2337, a CDRL2 of SEQ ID NO: 2338, and a CDRL3 of SEQ ID NO: 2339; (aaa) the VH comprises a CDRH1 of SEQ ID NO: 1653, a CDRH2 of SEQ ID NO: 1654, and a CDRH3 of SEQ ID NO: 1655, and the VL comprises a CDRL1 of SEQ ID NO: 2340, a CDRL2 of SEQ ID NO: 2341, and a CDRL3 of SEQ ID NO: 2342; (bbb) the VH comprises a CDRH1 of SEQ ID NO: 1656, a CDRH2 of SEQ ID NO: 1657, and a CDRH3 of SEQ ID NO: 1658, and the VL comprises a CDRL1 of SEQ ID NO: 2343, a CDRL2 of SEQ ID NO: 2344, and a CDRL3 of SEQ ID NO: 2345; or (ccc) the VH comprises a CDRH1 of SEQ ID NO: 1659, a CDRH2 of SEQ ID NO: 1660, and a CDRH3 of SEQ ID NO: 1661, and the VL comprises a CDRL1 of SEQ ID NO: 2346, a CDRL2 of SEQ ID NO: 2347, and a CDRL3 of SEQ ID NO: 2348.

[0769] Embodiment 98. The genetically engineered NK cell of embodiment 96 or 97, wherein the first antigen recognition domain comprises a VH and a VL, wherein:

[0770] (a) the VH comprises SEQ ID NO: 82 and the VL comprises SEQ ID NO: 84; (b) the VH comprises SEQ ID NO: 21 and the VL comprises SEQ ID NO: 23; (c) the VH comprises SEQ ID NO: 31 and the VL comprises SEQ ID NO: 33; (d) the VH comprises SEQ ID NO: 41 and the VL comprises SEQ ID NO: 43; (e) the VH comprises SEQ ID NO: 51 and the VL comprises SEQ ID NO: 53; (f) the VH comprises SEQ ID NO: 61 and the VL comprises SEQ ID NO: 63; (g) the VH comprises SEQ ID NO: 693 and the VL comprises SEQ ID NO: 66; (h) the VH comprises SEQ ID NO: 694 and the VL comprises SEQ ID NO: 69; (i) the VH comprises SEQ ID NO: 695 and the VL comprises SEQ ID NO: 72; (j) the VH comprises SEQ ID NO: 74 and the VL comprises SEQ ID NO: 76; (k) the VH comprises SEQ ID NO: 78 and the VL comprises SEQ ID NO: 80; (1) the VH comprises SEQ ID NO: 11 and the VL comprises SEQ ID NO: 13; (m) the VH comprises SEQ ID NO: 92 and the VL comprises SEQ ID NO: 94; (n) the VH comprises SEQ ID NO: 102 and the VL comprises SEQ ID NO: 103; (o) the VH comprises SEQ ID NO: 104 and the VL comprises SEQ ID NO: 105; (p) the VH comprises SEQ ID NO: 712 and the VL comprises SEQ ID NO: 713; (q) the VH comprises SEQ ID NO: 714 and the VL comprises SEQ ID NO: 715; (r) the VH comprises SEQ ID NO: 716 and the VL comprises SEQ ID NO: 717; (s) the VH comprises SEQ ID NO: 718 and the VL comprises SEQ ID NO: 719; (t) the VH comprises SEQ ID NO: 720 and the VL comprises SEQ ID NO: 721; (u) the VH comprises SEQ ID NO: 722 and the VL comprises SEQ ID NO: 723; (v) the VH comprises SEQ ID NO: 724 and the VL comprises SEQ ID NO: 725; (w) the VH comprises SEQ ID NO: 948 and the VL comprises SEQ ID NO: 949; (x) the VH comprises SEQ ID NO: 950 and the VL comprises SEQ ID NO: 951; (y) the VH comprises SEQ ID NO: 952 and the VL comprises SEQ ID NO: 953; (z) the VH comprises SEQ ID NO: 954 and the VL comprises SEQ ID NO: 955; (aa) the VH comprises SEQ ID NO: 958 and the VL comprises SEQ ID NO: 959; (bb) the VH comprises SEQ ID NO: 960 and the VL comprises SEQ ID NO: 961; (cc) the VH comprises SEQ ID NO: 964 and the VL comprises SEQ ID NO: 965; (dd) the VH comprises SEQ ID NO: 966 and the VL comprises SEQ ID NO: 967; (ee) the VH comprises SEQ ID NO: 968 and the VL comprises SEQ ID NO: 969; (ff) the VH comprises SEQ ID NO: 970 and the VL comprises SEQ ID NO: 971; (gg) the VH comprises SEQ ID NO: 972 and the VL comprises SEQ ID NO: 973; (hh) the VH comprises SEQ ID NO: 974 and the VL comprises SEQ ID NO: 975; (ii) the VH comprises SEQ ID NO: 976 and the VL comprises SEQ ID NO: 977; (jj) the VH comprises SEQ ID NO: 980 and the VL comprises SEQ ID NO: 981; (kk) the VH comprises SEQ ID NO: 982 and the VL comprises SEQ ID NO: 983; (11) the VH comprises SEQ ID NO: 984 and the VL comprises SEQ ID NO: 985; (mm) the VH comprises SEQ ID NO: 990 and the VL comprises SEQ ID NO: 991; (nn) the VH comprises SEQ ID NO: 992 and the VL comprises SEQ ID NO: 993; (oo) the VH comprises SEQ ID NO: 994 and the VL comprises SEQ ID NO: 995; (pp) the VH comprises SEQ ID NO: 996 and the VL comprises SEQ ID NO: 997; (qq) the VH comprises SEQ ID NO: 998 and the VL comprises SEQ ID NO: 999; (rr) the VH comprises SEQ ID NO: 1000 and the VL comprises SEQ ID NO: 1001; (ss) the VH comprises SEQ ID NO: 1002 and the VL comprises SEQ ID NO: 1003; (tt) the VH comprises SEQ ID NO: 1004 and the VL comprises SEQ ID NO: 1005; (uu) the VH comprises SEQ ID NO: 1006 and the VL comprises SEQ ID NO: 1007; (vv) the VH comprises SEQ ID NO: 1008 and the VL comprises SEQ ID NO: 1009; (ww) the VH comprises SEQ ID NO: 1010 and the VL comprises SEQ ID NO: 1011; (xx) the VH comprises SEQ ID NO: 1016 and the VL comprises SEQ ID NO: 1017; (yy) the VH comprises SEQ ID NO: 1018 and the VL comprises SEQ ID NO: 1019; (zz) the VH comprises SEQ ID NO: 1020 and the VL comprises SEQ ID NO: 1021; (aaa) the VH comprises SEQ ID NO: 1022 and the VL comprises SEQ ID NO: 1023; (bbb) the VH comprises SEQ ID NO: 1024 and the VL comprises SEQ ID NO: 1025; (ccc) the VH comprises SEQ ID NO: 1026 and the VL comprises SEQ ID NO: 1027; (ddd) the VH comprises SEQ ID NO: 1028 and the VL comprises SEQ ID NO: 1029; (eee) the VH comprises SEQ ID NO: 1030 and the VL comprises SEQ ID NO: 1031; (fff) the VH comprises SEQ ID NO: 1032 and the VL comprises SEQ ID NO: 1033; (ggg) the VH comprises SEQ ID NO: 1034 and the VL comprises SEQ ID NO: 1035; (hhh) the VH comprises SEQ ID NO: 1036 and the VL comprises SEQ ID NO: 1037; or (iii) the VH comprises SEQ ID NO: 1038 and the VL comprises SEQ ID NO: 1039.

[0771] Embodiment 99. The genetically engineered NK cell of any one of embodiments 86-98, wherein the genetically engineered NK cell is derived from umbilical cord blood cells, PBMCs, mobilized PBSCs, unmobilized PBSCs, hESCs, iPSCs, MSCs, HSCs, bone marrow or CD34⁺ cells.

[0772] Embodiment 100. The genetically engineered NK cell of any one of embodiments 86-99, wherein the genetically engineered NK cell is a human NK cell.

[0773] Embodiment 101. The genetically engineered NK cell of any of embodiment 86-100, wherein the genetically engineered NK cell comprises a knockout or knockdown of a cellular gene.

[0774] Embodiment 102. The genetically engineered NK cell of embodiment 101, wherein the cellular gene is selected from CD70, CISH, PD1, TGFBR1, TFGBR2, or a combination thereof.

[0775] Embodiment 103. The genetically engineered NK cell of any one of embodiments 86-102, wherein the genetically engineered NK cell comprises a first CAR and/or a polynucleotide encoding the first CAR, wherein the first CAR comprises (a) an extracellular domain comprising a second antigen recognition domain that specifically binds human CD70; (b) a transmembrane domain; and (c) an intracellular domain.

[0776] Embodiment 104. The genetically engineered NK cell of embodiment 103, wherein the genetically engineered NK cell expresses the CAR.

[0777] Embodiment 105. The genetically engineered NK cell of embodiment 103 or 104, wherein the second antigen recognition domain comprises a scFv comprising a VH and a VL, wherein: (a) the VH comprises a CDRH1 of SEQ ID NO: 86, a CDRH2 of SEQ ID NO: 87, and a CDRH3 of SEQ ID NO: 88, and the VL comprises a CDRL1 of SEQ ID NO: 89, a CDRL2 of SEQ ID NO: 90, and a CDRL3 of SEQ ID NO: 91; (b) the VH comprises a CDRH1 of SEQ ID NO: 25, a CDRH2 of SEQ ID NO: 26, and a CDRH3 of SEQ ID NO: 27, and the VL comprises a CDRL1 of SEQ ID NO: 28, a CDRL2 of SEQ ID NO: 29, and a CDRL3 of SEQ ID NO: 30;

[0778] (c) the VH comprises a CDRH1 of SEQ ID NO: 35, a CDRH2 of SEQ ID NO: 36, and a CDRH3 of SEQ ID NO: 37, and the VL comprises a CDRL1 of SEQ ID NO: 38, a CDRL2 of SEQ ID NO: 39, and a CDRL3 of SEQ ID NO: 40; (d) the VH comprises a CDRH1 of SEQ ID NO: 45, a CDRH2 of SEQ ID NO: 46, and a CDRH3 of SEQ ID NO: 47, and the VL comprises a CDRL1 of SEQ ID NO: 48, a CDRL2 of SEQ ID NO: 49, and a CDRL3 of SEQ ID NO: 50; (e) the VH comprises a CDRH1 of SEQ ID NO: 55, a CDRH2 of SEQ ID NO: 56, and a CDRH3 of SEQ ID NO: 57, and the VL comprises a CDRL1 of SEQ ID NO: 58, a CDRL2 of SEQ ID NO: 59, and a CDRL3 of SEQ ID NO: 60; (f) the VH comprises a CDRH1 of SEQ ID NO: 15, a CDRH2 of SEQ ID NO: 16, and a CDRH3 of SEQ ID NO: 17, and the VL comprises a CDRL1 of SEQ ID NO: 18, a CDRL2 of SEQ ID NO: 19, and a CDRL3 of SEQ ID NO: 20; (g) the VH comprises a CDRH1 of SEQ ID NO: 96, a CDRH2 of SEQ ID NO: 97, and a CDRH3 of SEQ ID NO: 98, and the VL comprises a CDRL1 of SEQ ID NO: 99, a CDRL2 of SEQ ID NO: 100, and a CDRL3 of SEQ ID NO: 101; (h) the VH comprises a CDRH1 of SEQ ID NO: 196, a CDRH2 of SEQ ID NO: 197, and a CDRH3 of SEQ ID NO: 198, and the VL comprises a CDRL1 of SEQ ID NO: 478, a CDRL2 of SEQ ID NO: 479, and a CDRL3 of SEQ ID NO: 480; (i) the VH comprises a CDRH1 of SEQ ID NO: 202, a CDRH2 of SEQ ID NO: 203, and a CDRH3 of SEQ ID NO: 204, and the VL comprises a CDRL1 of SEQ ID NO: 481, a CDRL2 of SEQ ID NO: 482, and a CDRL3 of SEQ ID NO: 483; (j) the VH comprises a CDRH1 of SEQ ID NO: 1170, a CDRH2 of SEQ ID NO: 1171, and a CDRH3 of SEQ ID NO: 1172, and the VL comprises a CDRL1 of SEQ ID NO: 1857, a CDRL2 of SEQ ID NO: 1858, and a CDRL3 of SEQ ID NO: 1859; (k) the VH comprises a CDRH1 of SEQ ID NO: 1173, a CDRH2 of SEQ ID NO: 1174, and a CDRH3 of SEQ ID NO: 1175, and the VL comprises a CDRL1 of SEQ ID NO: 1860, a CDRL2 of SEQ ID NO: 1861, and a CDRL3 of SEQ ID NO: 1862; (1) the VH comprises a CDRH1 of SEQ ID NO: 1176, a CDRH2 of SEQ ID NO: 1177, and a CDRH3 of SEQ ID NO: 1178, and the VL comprises a CDRL1 of SEQ ID NO: 1863, a CDRL2 of SEQ ID NO: 1864, and a CDRL3 of SEQ ID NO: 1865; (m) the VH comprises a CDRH1 of SEQ ID NO: 1179, a CDRH2 of SEQ ID NO: 1180, and a CDRH3 of SEQ ID NO: 1181, and the VL comprises a CDRL1 of SEQ ID NO: 1866, a CDRL2 of SEQ ID NO: 1867, and a CDRL3 of SEQ ID NO: 1868; (n) the VH comprises a CDRH1 of SEQ ID NO: 1182, a CDRH2 of SEQ ID NO: 1183, and a CDRH3 of SEQ ID NO: 1184, and the VL comprises a CDRL1 of SEQ ID NO: 1869, a CDRL2 of SEQ ID NO: 1870, and a CDRL3 of SEQ ID NO: 1871; (o) the VH comprises a CDRH1 of SEQ ID NO: 1185, a CDRH2 of SEQ ID NO: 1186, and a CDRH3 of SEQ ID NO: 1187, and the VL comprises a CDRL1 of SEQ ID NO: 1872, a CDRL2 of SEQ ID NO: 1873, and a CDRL3 of SEQ ID NO: 1874; (p) the VH comprises a CDRH1 of SEQ ID NO: 1188, a CDRH2 of SEQ ID NO: 1189, and a CDRH3 of SEQ ID NO: 1190, and the VL comprises a CDRL1 of SEQ ID NO: 1875, a CDRL2 of SEQ ID NO: 1876, and a CDRL3 of SEQ ID NO: 1877; (q) the VH comprises a CDRH1 of SEQ ID NO: 1524, a CDRH2 of SEQ ID NO: 1525, and a CDRH3 of SEQ ID NO: 1526, and the VL comprises a CDRL1 of SEQ ID NO: 2211, a CDRL2 of SEQ ID NO: 2212, and a CDRL3 of SEQ ID NO: 2213; (r) the VH comprises a CDRH1 of SEQ ID NO: 1527, a CDRH2 of SEQ ID NO: 1528, and a CDRH3 of SEQ ID NO: 1529, and the VL comprises a CDRL1 of SEQ ID NO: 2214, a CDRL2 of SEQ ID NO: 2215, and a CDRL3 of SEQ ID NO: 2216; (s) the VH comprises a CDRH1 of SEQ ID NO: 1530, a CDRH2 of SEQ ID NO: 1531, and a CDRH3 of SEQ ID NO: 1532, and the VL comprises a CDRL1 of SEQ ID NO: 2217, a CDRL2 of SEQ ID NO: 2218, and a CDRL3 of SEQ ID NO: 2219; (t) the VH comprises a CDRH1 of SEQ ID NO: 1533, a CDRH2 of SEQ ID NO: 1534, and a CDRH3 of SEQ ID NO: 1535, and the VL comprises a CDRL1 of SEQ ID NO: 2220, a CDRL2 of SEQ ID NO: 2221, and a CDRL3 of SEQ ID NO: 2222; (u) the VH comprises a CDRH1 of SEQ ID NO: 1539, a CDRH2 of SEQ ID NO: 1540, and a CDRH3 of SEQ ID NO: 1541, and the VL comprises a CDRL1 of SEQ ID NO: 2226, a CDRL2 of SEQ ID NO: 2227, and a CDRL3 of SEQ ID NO: 2228; (v) the VH comprises a CDRH1 of SEQ ID NO: 1542, a CDRH2 of SEQ ID NO: 1543, and a CDRH3 of SEQ ID NO: 1544, and the VL comprises a CDRL1 of SEQ ID NO: 2229, a CDRL2 of SEQ ID NO: 2230, and a CDRL3 of SEQ ID NO: 2231; (w) the VH comprises a CDRH1 of SEQ ID NO: 1548, a CDRH2 of SEQ ID NO: 1549, and a CDRH3 of SEQ ID NO: 1550, and the VL comprises a CDRL1 of SEQ ID NO: 2235, a CDRL2 of SEQ ID NO: 2236, and a CDRL3 of SEQ ID NO: 2237; (x) the VH comprises a CDRH1 of SEQ ID NO: 1551, a CDRH2 of SEQ ID NO: 1552, and a CDRH3 of SEQ ID NO: 1553, and the VL comprises a CDRL1 of SEQ ID NO: 2238, a CDRL2 of SEQ ID NO: 2239, and a CDRL3 of SEQ ID NO: 2240; (y) the VH comprises a CDRH1 of SEQ ID NO: 1554, a CDRH2 of SEQ ID NO: 1555, and a CDRH3 of SEQ ID NO: 1556, and the VL comprises a CDRL1 of SEQ ID NO: 2241, a CDRL2 of SEQ ID NO: 2242, and a CDRL3 of SEQ ID NO: 2243; (z) the VH comprises a CDRH1 of SEQ ID NO: 1557, a CDRH2 of SEQ ID NO: 1558, and a CDRH3 of SEQ ID NO: 1559, and the VL comprises a CDRL1 of SEQ ID NO: 2244, a CDRL2 of SEQ ID NO: 2245, and a CDRL3 of SEQ ID NO: 2246; (aa) the VH comprises a CDRH1 of SEQ ID NO: 1560, a CDRH2 of SEQ ID NO: 1561, and a CDRH3 of SEQ ID NO: 1562, and the VL comprises a CDRL1 of SEQ ID NO: 2247, a CDRL2 of SEQ ID NO: 2248, and a CDRL3 of SEQ ID NO: 2249; (bb) the VH comprises a CDRH1 of SEQ ID NO: 1563, a CDRH2 of SEQ ID NO: 1564, and a CDRH3 of SEQ ID NO: 1565, and the VL comprises a CDRL1 of SEQ ID NO: 2250, a CDRL2 of SEQ ID NO: 2251, and a CDRL3 of SEQ ID NO: 2252; (cc) the VH comprises a CDRH1 of SEQ ID NO: 1566, a CDRH2 of SEQ ID NO: 1567, and a CDRH3 of SEQ ID NO: 1568, and the VL comprises a CDRL1 of SEQ ID NO: 2253, a CDRL2 of SEQ ID NO: 2254, and a CDRL3 of SEQ ID NO: 2255; (dd) the VH comprises a CDRH1 of SEQ ID NO: 1572, a CDRH2 of SEQ ID NO: 1573, and a CDRH3 of SEQ ID NO: 1574, and the VL comprises a CDRL1 of SEQ ID NO: 2259, a CDRL2 of SEQ ID NO: 2260, and a CDRL3 of SEQ ID NO: 2261; (ee) the VH comprises a CDRH1 of SEQ ID NO: 1575, a CDRH2 of SEQ ID NO: 1576, and a CDRH3 of SEQ ID NO: 1577, and the VL comprises a CDRL1 of SEQ ID NO: 2262, a CDRL2 of SEQ ID NO: 2263, and a CDRL3 of SEQ ID NO: 2264; (ff) the VH comprises a CDRH1 of SEQ ID NO: 1578, a CDRH2 of SEQ ID NO: 1579, and a CDRH3 of SEQ ID NO: 1580, and the VL comprises a CDRL1 of SEQ ID NO: 2265, a CDRL2 of SEQ ID NO: 2266, and a CDRL3 of SEQ ID NO: 2267; (gg) the VH comprises a CDRH1 of SEQ ID NO: 1587, a CDRH2 of SEQ ID NO: 1588, and a CDRH3 of SEQ ID NO: 1589, and the VL comprises a CDRL1 of SEQ ID NO: 2274, a CDRL2 of SEQ ID NO: 2275, and a CDRL3 of SEQ ID NO: 2276; (hh) the VH comprises a CDRH1 of SEQ ID NO: 1590, a CDRH2 of SEQ ID NO: 1591, and a CDRH3 of SEQ ID NO: 1592, and the VL comprises a CDRL1 of SEQ ID NO: 2277, a CDRL2 of SEQ ID NO: 2278, and a CDRL3 of SEQ ID NO: 2279; (ii) the VH comprises a CDRH1 of SEQ ID NO: 1593, a CDRH2 of SEQ ID NO: 1594, and a CDRH3 of SEQ ID NO: 1595, and the VL comprises a CDRL1 of SEQ ID NO: 2280, a CDRL2 of SEQ ID NO: 2281, and a CDRL3 of SEQ ID NO: 2282; (jj) the VH comprises a CDRH1 of SEQ ID NO: 1596, a CDRH2 of SEQ ID NO: 1597, and a CDRH3 of SEQ ID NO: 1598, and the VL comprises a CDRL1 of SEQ ID NO: 2283, a CDRL2 of SEQ ID NO: 2284, and a CDRL3 of SEQ ID NO: 2285; (kk) the VH comprises a CDRH1 of SEQ ID NO: 1599, a CDRH2 of SEQ ID NO: 1560, and a CDRH3 of SEQ ID NO: 1561, and the VL comprises a CDRL1 of SEQ ID NO: 2286, a CDRL2 of SEQ ID NO: 2287, and a CDRL3 of SEQ ID NO: 2288; (11) the VH comprises a CDRH1 of SEQ ID NO: 1602, a CDRH2 of SEQ ID NO: 1603, and a CDRH3 of SEQ ID NO: 1604, and the VL comprises a CDRL1 of SEQ ID NO: 2289, a CDRL2 of SEQ ID NO: 2290, and a CDRL3 of SEQ ID NO: 2291; (mm) the VH comprises a CDRH1 of SEQ ID NO: 1605, a CDRH2 of SEQ ID NO: 1606, and a CDRH3 of SEQ ID NO: 1607, and the VL comprises a CDRL1 of SEQ ID NO: 2292, a CDRL2 of SEQ ID NO: 2293, and a CDRL3 of SEQ ID NO: 2294; (nn) the VH comprises a CDRH1 of SEQ ID NO: 1608, a CDRH2 of SEQ ID NO: 1609, and a CDRH3 of SEQ ID NO: 1610, and the VL comprises a CDRL1 of SEQ ID NO: 2295, a CDRL2 of SEQ ID NO: 2296, and a CDRL3 of SEQ ID NO: 2297; (oo) the VH comprises a CDRH1 of SEQ ID NO: 1611, a CDRH2 of SEQ ID NO: 1612, and a CDRH3 of SEQ ID NO: 1613, and the VL comprises a CDRL1 of SEQ ID NO: 2298, a CDRL2 of SEQ ID NO: 2299, and a CDRL3 of SEQ ID NO: 2300; (pp) the VH comprises a CDRH1 of SEQ ID NO: 1614, a CDRH2 of SEQ ID NO: 1615, and a CDRH3 of SEQ ID NO: 1616, and the VL comprises a CDRL1 of SEQ ID NO: 2301, a CDRL2 of SEQ ID NO: 2302, and a CDRL3 of SEQ ID NO: 2303; (qq) the VH comprises a CDRH1 of SEQ ID NO: 1617, a CDRH2 of SEQ ID NO: 1618, and a CDRH3 of SEQ ID NO: 1619, and the VL comprises a CDRL1 of SEQ ID NO: 2304, a CDRL2 of SEQ ID NO: 2305, and a CDRL3 of SEQ ID NO: 2306; (rr) the VH comprises a CDRH1 of SEQ ID NO: 1626, a CDRH2 of SEQ ID NO: 1627, and a CDRH3 of SEQ ID NO: 1628, and the VL comprises a CDRL1 of SEQ ID NO: 2313, a CDRL2 of SEQ ID NO: 2314, and a CDRL3 of SEQ ID NO: 2315; (ss) the VH comprises a CDRH1 of SEQ ID NO: 1629, a CDRH2 of SEQ ID NO: 1630, and a CDRH3 of SEQ ID NO: 1631, and the VL comprises a CDRL1 of SEQ ID NO: 2316, a CDRL2 of SEQ ID NO: 2317, and a CDRL3 of SEQ ID NO: 2318; (tt) the VH comprises a CDRH1 of SEQ ID NO: 1632, a CDRH2 of SEQ ID NO: 1633, and a CDRH3 of SEQ ID NO: 1634, and the VL comprises a CDRL1 of SEQ ID NO: 2319, a CDRL2 of SEQ ID NO: 2320, and a CDRL3 of SEQ ID NO: 2321; (uu) the VH comprises a CDRH1 of SEQ ID NO: 1635, a CDRH2 of SEQ ID NO: 1636, and a CDRH3 of SEQ ID NO: 1637, and the VL comprises a CDRL1 of SEQ ID NO: 2322, a CDRL2 of SEQ ID NO: 2323, and a CDRL3 of SEQ ID NO: 2324; (vv) the VH comprises a CDRH1 of SEQ ID NO: 1638, a CDRH2 of SEQ ID NO: 1639, and a CDRH3 of SEQ ID NO: 1640, and the VL comprises a CDRL1 of SEQ ID NO: 2325, a CDRL2 of SEQ ID NO: 2326, and a CDRL3 of SEQ ID NO: 2327; (ww) the VH comprises a CDRH1 of SEQ ID NO: 1641, a CDRH2 of SEQ ID NO: 1642, and a CDRH3 of SEQ ID NO: 1643, and the VL comprises a CDRL1 of SEQ ID NO: 2328, a CDRL2 of SEQ ID NO: 2329, and a CDRL3 of SEQ ID NO: 2330; (xx) the VH comprises a CDRH1 of SEQ ID NO: 1644, a CDRH2 of SEQ ID NO: 1645, and a CDRH3 of SEQ ID NO: 1646, and the VL comprises a CDRL1 of SEQ ID NO: 2331, a CDRL2 of SEQ ID NO: 2332, and a CDRL3 of SEQ ID NO: 2333; (yy) the VH comprises a CDRH1 of SEQ ID NO: 1647, a CDRH2 of SEQ ID NO: 1648, and a CDRH3 of SEQ ID NO: 1649, and the VL comprises a CDRL1 of SEQ ID NO: 2334, a CDRL2 of SEQ ID NO: 2335, and a CDRL3 of SEQ ID NO: 2336; (zz) the VH comprises a CDRH1 of SEQ ID NO: 1650, a CDRH2 of SEQ ID NO: 1651, and a CDRH3 of SEQ ID NO: 1652, and the VL comprises a CDRL1 of SEQ ID NO: 2337, a CDRL2 of SEQ ID NO: 2338, and a CDRL3 of SEQ ID NO: 2339; (aaa) the VH comprises a CDRH1 of SEQ ID NO: 1653, a CDRH2 of SEQ ID NO: 1654, and a CDRH3 of SEQ ID NO: 1655, and the VL comprises a CDRL1 of SEQ ID NO: 2340, a CDRL2 of SEQ ID NO: 2341, and a CDRL3 of SEQ ID NO: 2342; (bbb) the VH comprises a CDRH1 of SEQ ID NO: 1656, a CDRH2 of SEQ ID NO: 1657, and a CDRH3 of SEQ ID NO: 1658, and the VL comprises a CDRL1 of SEQ ID NO: 2343, a CDRL2 of SEQ ID NO: 2344, and a CDRL3 of SEQ ID NO: 2345; or (ccc) the VH comprises a CDRH1 of SEQ ID NO: 1659, a CDRH2 of SEQ ID NO: 1660, and a CDRH3 of SEQ ID NO: 1661, and the VL comprises a CDRL1 of SEQ ID NO: 2346, a CDRL2 of SEQ ID NO: 2347, and a CDRL3 of SEQ ID NO: 2348.

[0779] Embodiment 106. The genetically engineered NK cell of any one of embodiments 103-105, wherein the second antigen recognition domain comprises a scFv comprising a VH and a VL, wherein: (a) the VH comprises SEQ ID NO: 82 and the VL comprises SEQ ID NO: 84; (b) the VH comprises SEQ ID NO: 21 and the VL comprises SEQ ID NO: 23; (c) the VH comprises SEQ ID NO: 31 and the VL comprises SEQ ID NO: 33; (d) the VH comprises SEQ ID NO: 41 and the VL comprises SEQ ID NO: 43; (e) the VH comprises SEQ ID NO: 51 and the VL comprises SEQ ID NO: 53; (f) the VH comprises SEQ ID NO: 61 and the VL comprises SEQ ID NO: 63; (g) the VH comprises SEQ ID NO: 693 and the VL comprises SEQ ID NO: 66; (h) the VH comprises SEQ ID NO: 694 and the VL comprises SEQ ID NO: 69; (i) the VH comprises SEQ ID NO: 695 and the VL comprises SEQ ID NO: 72; (j) the VH comprises SEQ ID NO: 74 and the VL comprises SEQ ID NO: 76; (k) the VH comprises SEQ ID NO: 78 and the VL comprises SEQ ID NO: 80; (1) the VH comprises SEQ ID NO: 11 and the VL comprises SEQ ID NO: 13; (m) the VH comprises SEQ ID NO: 92 and the VL comprises SEQ ID NO: 94; (n) the VH comprises SEQ ID NO: 102 and the VL comprises SEQ ID NO: 103; (o) the VH comprises SEQ ID NO: 104 and the VL comprises SEQ ID NO: 105; (p) the VH comprises SEQ ID NO: 712 and the VL comprises SEQ ID NO: 713; (q) the VH comprises SEQ ID NO: 714 and the VL comprises SEQ ID NO: 715; (r) the VH comprises SEQ ID NO: 716 and the VL comprises SEQ ID NO: 717; (s) the VH comprises SEQ ID NO: 718 and the VL comprises SEQ ID NO: 719; (t) the VH comprises SEQ ID NO: 720 and the VL comprises SEQ ID NO: 721; (u) the VH comprises SEQ ID NO: 722 and the VL comprises SEQ ID NO: 723; (v) the VH comprises SEQ ID NO: 724 and the VL comprises SEQ ID NO: 725; (w) the VH comprises SEQ ID NO: 948 and the VL comprises SEQ ID NO: 949; (x) the VH comprises SEQ ID NO: 950 and the VL comprises SEQ ID NO: 951; (y) the VH comprises SEQ ID NO: 952 and the VL comprises SEQ ID NO: 953; (z) the VH comprises SEQ ID NO: 954 and the VL comprises SEQ ID NO: 955; (aa) the VH comprises SEQ ID NO: 958 and the VL comprises SEQ ID NO: 959; (bb) the VH comprises SEQ ID NO: 960 and the VL comprises SEQ ID NO: 961; (cc) the VH comprises SEQ ID NO: 964 and the VL comprises SEQ ID NO: 965; (dd) the VH comprises SEQ ID NO: 966 and the VL comprises SEQ ID NO: 967; (ee) the VH comprises SEQ ID NO: 968 and the VL comprises SEQ ID NO: 969; (ff) the VH comprises SEQ ID NO: 970 and the VL comprises SEQ ID NO: 971; (gg) the VH comprises SEQ ID NO: 972 and the VL comprises SEQ ID NO: 973; (hh) the VH comprises SEQ ID NO: 974 and the VL comprises SEQ ID NO: 975; (ii) the VH comprises SEQ ID NO: 976 and the VL comprises SEQ ID NO: 977; (jj) the VH comprises SEQ ID NO: 980 and the VL comprises SEQ ID NO: 981; (kk) the VH comprises SEQ ID NO: 982 and the VL comprises SEQ ID NO: 983; (11) the VH comprises SEQ ID NO: 984 and the VL comprises SEQ ID NO: 985; (mm) the VH comprises SEQ ID NO: 990 and the VL comprises SEQ ID NO: 991; (nn) the VH comprises SEQ ID NO: 992 and the VL comprises SEQ ID NO: 993; (oo) the VH comprises SEQ ID NO: 994 and the VL comprises SEQ ID NO: 995; (pp) the VH comprises SEQ ID NO: 996 and the VL comprises SEQ ID NO: 997; (qq) the VH comprises SEQ ID NO: 998 and the VL comprises SEQ ID NO: 999; (rr) the VH comprises SEQ ID NO: 1000 and the VL comprises SEQ ID NO: 1001; (ss) the VH comprises SEQ ID NO: 1002 and the VL comprises SEQ ID NO: 1003; (tt) the VH comprises SEQ ID NO: 1004 and the VL comprises SEQ ID NO: 1005; (uu) the VH comprises SEQ ID NO: 1006 and the VL comprises SEQ ID NO: 1007; (vv) the VH comprises SEQ ID NO: 1008 and the VL comprises SEQ ID NO: 1009; (ww) the VH comprises SEQ ID NO: 1010 and the VL comprises SEQ ID NO: 1011; (xx) the VH comprises SEQ ID NO: 1016 and the VL comprises SEQ ID NO: 1017; (yy) the VH comprises SEQ ID NO: 1018 and the VL comprises SEQ ID NO: 1019; (zz) the VH comprises SEQ ID NO: 1020 and the VL comprises SEQ ID NO: 1021; (aaa) the VH comprises SEQ ID NO: 1022 and the VL comprises SEQ ID NO: 1023; (bbb) the VH comprises SEQ ID NO: 1024 and the VL comprises SEQ ID NO: 1025; (ccc) the VH comprises SEQ ID NO: 1026 and the VL comprises SEQ ID NO: 1027; (ddd) the VH comprises SEQ ID NO: 1028 and the VL comprises SEQ ID NO: 1029; (eee) the VH comprises SEQ ID NO: 1030 and the VL comprises SEQ ID NO: 1031; (fff) the VH comprises SEQ ID NO: 1032 and the VL comprises SEQ ID NO: 1033; (ggg) the VH comprises SEQ ID NO: 1034 and the VL comprises SEQ ID NO: 1035; (hhh) the VH comprises SEQ ID NO: 1036 and the VL comprises SEQ ID NO: 1037; or (iii) the VH comprises SEQ ID NO: 1038 and the VL comprises SEQ ID NO: 1039.

[0780] Embodiment 107. The method of any one of embodiments 103-106, wherein the second antigen recognition domain comprises a single domain antibody fragment, an adnectin peptide, an affibody, an afflilin, an affimer, an affitin, an alphabody, an anticalin, an avimer, a DARPin (Designed Ankyrin Repeat Protein), a Fynomer, a Kunitz domain peptide, a monobody, a centyrin, an aptamer, a T cell receptor (TCR)-like antibody, a single chain TCR (scTCR), or a portion of any of the foregoing.

[0781] Embodiment 108. The method of embodiment 103 or 104, wherein the second antigen recognition domain comprises a human CD27 extracellular domain.

[0782] Embodiment 109. The method of embodiment 108, wherein the human CD27 extracellular domain comprises the amino acid sequence of SEQ ID NO: 8

[0783] Embodiment 110. The method of embodiment 108 or 109, wherein the human CD27 extracellular domain comprises a mutation.

[0784] Embodiment 111. The method of embodiment 110, wherein the mutation reduces shedding of the human CD27 extracellular domain.

[0785] Embodiment 112. The genetically engineered NK cell of any one of embodiments 103-111, wherein the extracellular domain comprises a hinge.

[0786] Embodiment 113. The genetically engineered NK cell of embodiment 112, wherein the hinge comprises: (a) a portion of the extracellular region of CD8, CD8alpha, CD4, CD28, 4-1BB, or IgG; and/or (b) a human immunoglobulin CH2 region, a human immunoglobulin CH3 region, or both a human immunoglobulin CH2 region and a human immunoglobulin CH3 region.

[0787] Embodiment 114. The genetically engineered NK cell of embodiment 112 or 113, wherein the hinge comprises a human immunoglobulin CH2 region and wherein the human immunoglobulin CH2 region is an IgG1, IgG2 or IgG4 immunoglobulin CH2 region.

[0788] Embodiment 115. The genetically engineered NK cell of embodiment 112 or 113, wherein the hinge comprises a human immunoglobulin CH3 region and wherein the human immunoglobulin CH3 region is an IgG1, IgG2 or IgG4 immunoglobulin CH3 region.

[0789] Embodiment 116. The genetically engineered NK cell of any one of embodiments 103-115, wherein the transmembrane domain comprises a CD8, CD16, CD27, CD28, NKG2D, NKp44, NKp46, NKp30, NKp80, DNAM-1, CD3 zeta, CD3 epsilon, CD3 gamma, CD3 delta, CD45, CD4, CD5, CD9, CD22, CD33, CD37, CD64, CD80, CD86, CD134, CD137, CD154, ICOS/CD278, GITR/CD357, DAP10, DAP12 or erythropoietin receptor transmembrane domain, a portion of any of the foregoing, or a combination of any of the foregoing.

[0790] Embodiment 117. The genetically engineered NK cell of any one of embodiments 103-116, wherein the intracellular domain comprises a costimulatory domain.

[0791] Embodiment 118. The genetically engineered NK cell of any one of embodiments 103-117, wherein the intracellular domain comprises two or three costimulatory domains.

[0792] Embodiment 119. The genetically engineered NK cell of embodiment 117 or 118, wherein the costimulatory domain comprises a CD28, 4-1BB, DAP10, DAP12, 2B4, OX40, OX40L, ICOS, or CD27 costimulatory domain, or a portion of any of the foregoing.

[0793] Embodiment 120. The genetically engineered NK cell of any one of embodiments 103-119, wherein the intracellular domain comprises an activation domain.

[0794] Embodiment 121. The genetically engineered NK cell of embodiment 120, wherein the activation domain comprises a DAP12, FCER1G, FCGR2 Å, CD3zeta intracellular signaling domain, or a portion of any of the foregoing.

[0795] Embodiment 122. The genetically engineered NK cell of embodiment 121, wherein the activation domain comprises the CD3zeta intracellular signaling domain and the CD3zeta intracellular signaling domain comprises a mutation in an ITAM domain.

[0796] Embodiment 123. The genetically engineered NK cell of embodiment 122, wherein the mutation in the ITAM domain of the CD3zeta intracellular signaling domain comprises point mutations of each of the two tyrosine residues in one or more of the ITAM1, ITAM2, or ITAM3 domains to a phenylalanine residue.

[0797] Embodiment 124. The genetically engineered NK cell of embodiment 122, wherein the mutation in the ITAM domain of the CD3zeta activation domain comprises a deletion of one or more of the ITAM1, ITAM2, or ITAM3 domains.

[0798] Embodiment 125. The genetically engineered NK cell of any one of embodiments 103-124 further comprising an additional exogenous polypeptide.

[0799] Embodiment 126. The genetically engineered NK cell of embodiment 125, wherein the additional exogenous polypeptide comprises a cytokine, chemokine, ligand, receptor, monoclonal antibody, bispecific T cell engager, peptide or enzyme, a subunit or a portion of the foregoing, or any combination of the foregoing.

[0800] Embodiment 127. The genetically engineered NK cell of embodiment 126, wherein the additional exogenous polypeptide comprises a cytokine and wherein the cytokine comprises IL-15, membrane-bound IL-15 (mbIL-15), IL-2, membrane-bound IL-2, IL-12, membrane-bound IL-12, IL-18, membrane-bound IL-18, IL-21, membrane-bound IL-21, p40, LIGHT, CD40L, FLT3L, 4-1BBL, or FASL.

[0801] Embodiment 128. The genetically engineered NK cell of embodiment 125, wherein the additional exogenous polypeptide comprises IL-15RA or a fusion protein comprising IL-15 and IL-15RA.

[0802] Embodiment 129. The genetically engineered NK cell of embodiment 125, wherein the additional exogenous polypeptide is a tethered IL-21, a tethered IL-12, or a tethered IL-18.

[0803] Embodiment 130. The genetically engineered NK cell of any one of embodiments 125-129, further comprising a second additional exogenous polypeptide.

[0804] Embodiment 131. The genetically engineered NK cell of embodiment 129, wherein: (a) the first additional exogenous polypeptide is mbIL-15 and the second additional exogenous polypeptide is IL-15RA; or (b) the first additional exogenous polypeptide is soluble IL-15 and the second additional exogenous polypeptide is IL-15RA.

[0805] Embodiment 132. The genetically engineered NK cell of embodiment 125, wherein the additional exogenous polypeptide comprises a receptor and the receptor comprises CSF-1R, a CXC chemokine receptor (e.g., CXCR1, CXCR2, CXCR3, CXCR4, CXCR5, CXCR6, or CXCR7), a CC chemokine receptor (e.g., CCR1, CCR2, CCR3, CCR4, CCR5, CCR6, CCR7, CCR8, CCR9, CCR10, or CCR11), a CX3C chemokine receptor (e.g., CX3CR1), a XC chemokine receptor (e.g., XCR1), or a chemokine-binding fragment thereof.

[0806] Embodiment 133. The genetically engineered NK cell of embodiment 125, wherein the additional exogenous polypeptide is an enzyme and the enzyme comprises heparanase.

[0807] Embodiment 134. The genetically engineered NK cell of embodiment 125, wherein the additional exogenous polypeptide is a protein that overcomes immunosuppression of the tumor microenvironment.

[0808] Embodiment 135. The genetically engineered NK cell of embodiment 134, wherein the protein comprises a TGFbeta signal converter.

[0809] Embodiment 136. The genetically engineered NK cell of embodiment 135, wherein the TGFbeta signal converter comprises a TGFbeta receptor extracellular domain and an NK cell intracellular domain.

[0810] Embodiment 137. The genetically engineered NK cell of embodiment 136, wherein the NK cell intracellular domain comprises DAP10 or DAP12.

[0811] Embodiment 138. The genetically engineered NK cell of Embodiment 134, wherein the protein comprises a TGFbeta decoy receptor.

[0812] Embodiment 139. The genetically engineered NK cell of embodiment 125, wherein the additional exogenous polypeptide comprises a second CAR, comprising an antigen recognition domain that specifically binds an antigen other than human CD70.

[0813] Embodiment 140. The genetically engineered NK cell of embodiment 139, wherein the antigen other than human CD70 is CAIX, CD19, CD20, CD22, CD33, CD37, CD79a, CD79b, CD96, CD123, CD138, CLL-1, CXCR5, BCMA, FOLR2, FCRL5, FLT3, GPRC5D, HAVCR1, Her2, mesothelin, MUC16, EGFR, EGFRVIII, IL13Ra2, Trop2, GPC3, FOLR1, or GD2.

[0814] Embodiment 141. The genetically engineered NK cell of embodiment 125, wherein the additional exogenous polypeptide comprises a safety switch protein.

[0815] Embodiment 142. The genetically engineered NK cell of embodiment 125, wherein the genetically engineered NK cell comprises an additional exogenous polypeptide linked to the genetically engineered NK cell by chemical conjugation or by a sortase-mediated transpeptidation reaction.

[0816] Embodiment 143. The genetically engineered NK cell of any one of embodiments 86-142, wherein the genetically engineered NK has a reduced likelihood of fratricide by a NK cell expressing an anti-CD70 CAR compared to the likelihood of fratricide of a NK cell that has not been modified to one or more of: (a) a decreased level of total expressed CD70 polypeptide compared to the level of total expressed CD70 polypeptide in a wild-type NK cell; (b) a decreased level of surface expressed CD70 polypeptide compared to the level of surface expressed CD70 in a wild-type NK cell; (c) a decreased level of total expressed CD70 polypeptide compared to the level of total expressed CD70 polypeptide in a wild-type NK cell and comprise an anti-CD70 CAR; and (d) a decreased level of surface expressed CD70 polypeptide compared to the level of surface expressed CD70 in a wild-type NK cell and comprise an anti-CD70 CAR.

[0817] Embodiment 144. The genetically engineered NK cell of any one of embodiments 86-143, wherein the genetically engineered NK cell exhibits greater cell expansion rate thana NK cell that has not been modified to one or more of: (a) a decreased level of total expressed CD70 polypeptide compared to the level of total expressed CD70 polypeptide in a wild-type NK cell;

[0818] (b) a decreased level of surface expressed CD70 polypeptide compared to the level of surface expressed CD70 in a wild-type NK cell; (c) a decreased level of total expressed CD70 polypeptide compared to the level of total expressed CD70 polypeptide in a wild-type NK cell and comprise an anti-CD70 CAR; and (d) a decreased level of surface expressed CD70 polypeptide compared to the level of surface expressed CD70 in a wild-type NK cell and comprise an anti-CD70 CAR.

[0819] Embodiment 145. A population of cells, wherein at least about 30%, about 40%, about 50%, about 60%, about 70%, about 80%, about 90% or about 95% of the cells in the population are each the genetically engineered NK cell of any one of embodiments 86-144.

[0820] Embodiment 146. A pharmaceutical composition comprising the genetically engineered NK cell of any one of embodiments 84-124 or the population of embodiment 145, and a pharmaceutically acceptable carrier, diluent or excipient.

[0821] Embodiment 147. The pharmaceutical composition of Embodiment 146, wherein the pharmaceutical composition is cryopreserved.

[0822] Embodiment 148. The pharmaceutical composition of embodiment 147, wherein at least 10% of the NK cells in the cryopreserved pharmaceutical composition specifically bind human CD70 after thawing.

[0823] Embodiment 149. The pharmaceutical composition of any one of embodiments 146-148, wherein the pharmaceutical composition comprises from about 5×10⁵ NK cells to about 10×10¹² NK cells.

[0824] Embodiment 150. A method for treating a cancer in a subject, the method comprising administering to the subject an effective amount of the population of embodiment 145 or the pharmaceutical composition of any one of embodiment 146-148.

[0825] Embodiment 151. The method of embodiment 150, wherein the cancer is a CD70-positive cancer.

[0826] Embodiment 152. The method of embodiment 150 or 151, wherein the cancer is a solid tumor.

[0827] Embodiment 153. The method of embodiment 150 or 151, wherein the cancer is renal, lung, colorectal, ovarian, breast, head and neck, pancreatic, gastric, cervical, esophageal, or lung cancer, or glioblastoma.

[0828] Embodiment 154. The method of embodiment 150 or 151, wherein the cancer is a hematologic malignancy.

[0829] Embodiment 155. The method of embodiment 154, wherein the hematologic malignancy is acute myeloid leukemia (AML), non-Hodgkin's lymphoma (e.g., diffuse large B cell lymphoma (DLBCL), mantle cell lymphoma (MCL)), acute lymphoblastic leukemia, peripheral T-cell lymphoma (PTCL), anaplastic large cell lymphoma (ALCL), myelodysplastic syndrome (MDS), multiple myeloma, Waldenstrom's macroglobulinemia, or chronic lymphocytic leukemia (CLL).

[0830] Embodiment 156. The method of any one of embodiments 150-155, wherein the method further comprises administering an additional therapeutic agent.

[0831] Embodiment 157. The method of embodiment 156, wherein the additional therapeutic agent comprises an immune activator, a tyrosine kinase inhibitor, a metabolic inhibitor, an immune checkpoint inhibitor, a cytokine or a hypomethylating agent.

[0832] Embodiment 158. The method of embodiment 157, wherein the additional therapeutic agent is the immune activator, and the immune activator comprises 4-1BBL or OX-40.

[0833] Embodiment 159. The method of embodiment 157, wherein the additional therapeutic agent is the metabolic inhibitor and the metabolic inhibitor comprises an A2AR or IDO inhibitor.

[0834] Embodiment 160. The method of embodiment 157, wherein additional therapeutic agent is the checkpoint inhibitor and the checkpoint inhibitor comprises a PD-1, PD-L1, PD-L2, CTLA4, B7-H3, BTLA, KIR, LAG3, TIM-3, VISTA, AHR, c-cb1, or HPK1 inhibitor.

[0835] Embodiment 161. The method of embodiment 157, wherein the additional agent is the cytokine and the cytokine comprises IL-2, IL-15, IL-12, IL-18, or IL-21.

[0836] Embodiment 162. The method of embodiment 157, wherein the additional agent is the hypomethylating agent and the hypomethylating agent comprises azacitidine and/or decitabine.

[0837] Embodiment 163. The method of any one of embodiment s 150-162, wherein the population or pharmaceutical composition is administered to a human subject at a dose ranging from about 1×10⁵ NK cells per kg body weight to about 10×10⁹ NK cells per kg body weight.

1. A method of making a population of genetically engineered Natural Killer (NK) cells, the method comprising:
(a) contacting a population of NK cells with a CD70 inhibitor; and
(b) expanding the population of NK cells in vitro.

2. (canceled)

3. The method of claim 1, wherein the population of NK cells exhibits at least about 25% greater cell expansion compared to a population of NK cells that is not contacted with the CD70 inhibitor.

4. The method of claim 1, wherein the method further comprises, prior to step (a), isolating CD56⁺ cells and/or CD3⁻/CD56⁺ cells from a population of peripheral blood mononuclear cells (PBMCs) to obtain the population of NK cells.

5.-11. (canceled)

12. The method of claim 1, wherein the CD70 inhibitor comprises:
a small interfering RNA (siRNA) that targets CD70 mRNA, a short hairpin RNA (shRNA) that targets CD70 mRNA, a nucleic acid encoding a siRNA that targets CD70 mRNA, a nucleic acid encoding an shRNA that targets CD70 mRNA, a nucleic acid encoding a tandem shRNA that targets CD70 mRNA, a tandem shRNA that targets CD70 mRNA, a nucleic acid encoding a ribozyme that targets CD70 mRNA, a ribozyme that targets CD70 mRNA, or a combination of any of the foregoing;
an RNA-guided endonuclease and a guide RNA (gRNA) targeting a CD70 gene;
a Protein Expression Blocker (PEBL) or a nucleic acid encoding a PEBL, wherein the PEBL comprises a first antigen recognition domain that specifically binds human CD70 and one or more of a localizing domain, an intracellular retention domain and an endoplasmic reticulum (ER) retention domain; or
an antagonistic anti-CD70 antibody or an antigen-binding fragment thereof.

13.-19. (canceled)

20. The method of claim 1, further comprising:
(c) contacting the population of NK cells with a polynucleotide encoding a chimeric antigen receptor (CAR) under conditions sufficient to transfer the polynucleotide across a cell membrane of at least one NK cell in the population of NK cells, wherein the CAR comprises:
(i) an extracellular domain comprising a second antigen recognition domain that specifically binds human CD70;
(ii) a transmembrane domain; and
(iii) an intracellular domain.

21.-32. (canceled)

33. The method of claim 1, further comprising:
(e) contacting the population of NK cells with at least one polynucleotide encoding at least one exogenous polypeptide.

34.-49. (canceled)

50. A genetically engineered natural killer (NK) cell modified to have:
a) a decreased level of total expressed CD70 polypeptide compared to the level of total expressed CD70 polypeptide in a wild-type NK cell, and/or
b) a decreased level of surface expressed CD70 polypeptide compared to the level of surface expressed CD70 in a wild-type NK cell.

51.-52. (canceled)

53. The genetically engineered NK cell of claim 50, wherein the genetically engineered NK cell comprises at least about 30% less of surface expressed CD70 polypeptide and/or total expressed CD70 polypeptide than the wild-type NK cell.

54. The genetically engineered NK cell of claim 50, wherein the level of CD70 mRNA in the genetically engineered NK cell is reduced as compared to the level of CD70 mRNA in a wild-type NK cell.

55. The genetically engineered NK cell of claim 50, wherein the genetically engineered NK cell comprises:
a siRNA that targets CD70 mRNA, a nucleic acid encoding a siRNA that targets CD70 mRNA, a shRNA that targets CD70 mRNA, a nucleic acid encoding a shRNA that targets CD70 mRNA, a nucleic acid encoding a tandem shRNA that targets CD70 mRNA, a tandem shRNA that targets CD70 mRNA, a nucleic acid encoding a ribozyme that targets CD70 mRNA, or a ribozyme that targets CD70 mRNA, or a combination of any of the foregoing;
an RNA guided endonuclease and a gRNA targeting a CD70 gene; or
a PEBL or a nucleic acid encoding a PEBL, wherein the PEBL comprises a first antigen recognition domain that specifically binds human CD70 and one or more of a localizing domain, an intracellular retention domain and an ER retention domain.

56.-57. (canceled)

58. The genetically engineered NK cell of claim 50, wherein the genetically engineered NK cell is derived from umbilical cord blood cells, PBMCs, mobilized unstimulated leukapheresis products (PBSCs), unmobilized PBSCs, human embryonic stem cells (hESCs), induced pluripotent stem cells (iPSCs), mesenchymal stem cells (MSCs), hematopoietic stem cells (HSCs), bone marrow, or CD34⁺ cells.

59. (canceled)

60. The genetically engineered NK cell of claim 50, wherein the genetically engineered NK cell comprises a CAR and/or a polynucleotide encoding the CAR, wherein the CAR comprises:
(a) an extracellular domain comprising a second antigen recognition domain that specifically binds human CD70;
(b) a transmembrane domain; and
(c) an intracellular domain.

61.-70. (canceled)

71. The genetically engineered NK cell of claim 50 further comprising at least one exogenous polypeptide.

72. The genetically engineered NK cell of claim 71, wherein the at least one exogenous polypeptide comprises a cytokine, chemokine, ligand, receptor, monoclonal antibody, bispecific T cell engager, peptide or enzyme, a subunit or a portion of the foregoing, or any combination of the foregoing.

73. The genetically engineered NK cell of claim 72, wherein the at least one exogenous polypeptide comprises a cytokine and wherein the cytokine comprises IL-15, membrane-bound IL-15 (mbIL-15), IL-2, membrane-bound IL-2, IL-12, membrane-bound IL-12, IL-18, membrane-bound IL-18, IL-21, membrane-bound IL-21, p40, LIGHT, CD40L, FLT3L, 4-1BBL, or FASL.

74. The genetically engineered NK cell of claim 71, wherein the at least one exogenous polypeptide comprises IL-15RA, IL-15, or is a fusion protein comprising IL-15 and IL-15RA.

75. (canceled)

76. The genetically engineered NK cell of claim 71, further comprising a first exogenous polypeptide comprising mbIL-15 and a second exogenous polypeptide comprising IL-15RA.

77. The genetically engineered NK cell of claim 71, wherein the at least one exogenous polypeptide comprises a receptor selected from the group consisting of: CSF-1R, a CXC chemokine receptor, a CC chemokine receptor, a CX3C chemokine receptor, a XC chemokine receptor, or a chemokine-binding fragment thereof.

78. (canceled)

79. The genetically engineered NK cell of claim 71, wherein the at least one exogenous polypeptide comprises a TGFbeta signal converter.

80. The genetically engineered NK cell of claim 79, wherein the TGFbeta signal converter comprises a TGFbeta receptor extracellular domain and an NK cell intracellular domain.

81. The genetically engineered NK cell of claim 71, wherein the at least one exogenous polypeptide comprises a TGFbeta decoy receptor comprising a TGFbeta receptor extracellular domain and optionally, a transmembrane domain.

82.-83. (canceled)

84. The genetically engineered NK cell of claim 71, wherein the at least one exogenous polypeptide comprises a CAR comprises at least one antigen recognition domain that specifically binds to an antigen other than human CD70.

85.-87. (canceled)

88. The genetically engineered NK cell of claim 50, wherein the genetically engineered NK has a reduced likelihood of fratricide by a NK cell expressing an anti-CD70 CAR compared to the likelihood of fratricide of a wild-type NK cell.

89. The genetically engineered NK cell of claim 50, wherein the genetically engineered NK cell exhibits greater fold cell expansion that a wildtype NK cell.

90. A population of cells, wherein at least about 30% of cells in the population are the genetically engineered NK cell of claim 50.

91. A pharmaceutical composition comprising the genetically engineered NK cell of claim 50, and a pharmaceutically acceptable carrier, diluent, or excipient.

92. A method for treating a cancer in a subject, the method comprising administering to the subject an effective amount of the pharmaceutical composition of claim 91.

93.-98. (canceled)

The application's sequence listing, which the Patent Office published only in electronic form, follows.

SEQUENCE LISTING (2945 sequences)

SEQ ID NO: 1-4 - skipped (4 entries)

SEQ ID NO: 5 - protein, 6 aa, Artificial Sequence
  synthetic polypeptide
  misc_feature (3)..(3): Xaa can be any naturally occurring amino acid
LPXTGG

SEQ ID NO: 6 - protein, 260 aa, Homo sapiens
MARPHPWWLCVLGTLVGLSATPAPKSCPERHYWAQGKLCCQMCEPGTFLVKDCDQHRKAAQCDPCIPGVSFSPDHHTRPHCESCRHCNSGLLVRNCTITANAECACRNGWQCRDKECTECDPLPNPSLTARSSQALSPHPQPTHLPYVSEMLEARTAGHMQTLADFRQLPARTLSTHWPPQRSLCSSDFIRILVIFSGMFLVFTLAGALFLHQRRKYRSNKGESPVEPAEPCHYSCPREEEGSTIPIQEDYRKPEPACSP

SEQ ID NO: 7 - protein, 19 aa, Artificial Sequence
  synthetic polypeptide
MARPHPWWLCVLGTLVGLS

SEQ ID NO: 8 - protein, 172 aa, Artificial Sequence
  synthetic polypeptide
ATPAPKSCPERHYWAQGKLCCQMCEPGTFLVKDCDQHRKAAQCDPCIPGVSFSPDHHTRPHCESCRHCNSGLLVRNCTITANAECACRNGWQCRDKECTECDPLPNPSLTARSSQALSPHPQPTHLPYVSEMLEARTAGHMQTLADFRQLPARTLSTHWPPQRSLCSSDFIR

SEQ ID NO: 9 - protein, 21 aa, Artificial Sequence
  synthetic polypeptide
ILVIFSGMFLVFTLAGALFLH

SEQ ID NO: 10 - protein, 48 aa, Artificial Sequence
  synthetic polypeptide
QRRKYRSNKGESPVEPAEPCHYSCPREEEGSTIPIQEDYRKPEPACSP

SEQ ID NO: 11 - protein, 118 aa, Artificial Sequence
  synthetic polypeptide
QVQLVESGGGVVQPGRSLRLSCAASGFTFSSYIMHWVRQAPGKGLEWVAVISYDGRNKYYADSVKGRFTISRDNSKNTLYLQMNSLRAEDTAVYYCARDTDGYDFDYWGQGTLVTVSS

SEQ ID NO: 12 - skipped

SEQ ID NO: 13 - protein, 107 aa, Artificial Sequence
  synthetic polypeptide
EIVLTQSPATLSLSPGERATLSCRASQSVSSYLAWYQQKPGQAPRLLIYDASNRATGIPARFSGSGSGTDFTLTISSLEPEDFAVYYCQQRTNWPLTFGGGTKVEIK

SEQ ID NO: 14 - skipped

SEQ ID NO: 15 - protein, 5 aa, Artificial Sequence
  synthetic polypeptide
SYIMH

SEQ ID NO: 16 - protein, 17 aa, Artificial Sequence
  synthetic polypeptide
VISYDGRNKYYADSVKG

SEQ ID NO: 17 - protein, 9 aa, Artificial Sequence
  synthetic polypeptide
DTDGYDFDY

SEQ ID NO: 18 - protein, 11 aa, Artificial Sequence
  synthetic polypeptide
RASQSVSSYLA

SEQ ID NO: 19 - protein, 8 aa, Artificial Sequence
  synthetic polypeptide
YDASNRAT

SEQ ID NO: 20 - protein, 9 aa, Artificial Sequence
  synthetic polypeptide
QQRTNWPLT

SEQ ID NO: 21 - protein, 119 aa, Artificial Sequence
  synthetic polypeptide
QIQLVESGGGVVQPGRSLRLSCAASGFTFGYYAMHWVRQAPGKGLEWVAVISYDGSIKYYADSVKGRFTISRDNSKNTLYLQMNSLRAEDTAVYYCAREGPYSNYLDYWGQGTLVTVSS

SEQ ID NO: 22 - skipped

SEQ ID NO: 23 - protein, 107 aa, Artificial Sequence
  synthetic polypeptide
AIQLTQSPSSLSASVGDRVTITCRASQGISSALAWYQQKPGKAPKFLIYDASSLESGVPSRFSGSGSGTDFTLTISSLQPEDFATYYCQQFNSYPFTFGPGTKVDIK

SEQ ID NO: 24 - skipped

SEQ ID NO: 25 - protein, 5 aa, Artificial Sequence
  synthetic polypeptide
YYAMH

SEQ ID NO: 26 - protein, 17 aa, Artificial Sequence
  synthetic polypeptide
VISYDGSIKYYADSVKG

SEQ ID NO: 27 - protein, 10 aa, Artificial Sequence
  synthetic polypeptide
EGPYSNYLDY

SEQ ID NO: 28 - protein, 11 aa, Artificial Sequence
  synthetic polypeptide
RASQGISSALA

SEQ ID NO: 29 - protein, 7 aa, Artificial Sequence
  synthetic polypeptide
DASSLES

SEQ ID NO: 30 - protein, 9 aa, Artificial Sequence
  synthetic polypeptide
QQFNSYPFT

SEQ ID NO: 31 - protein, 118 aa, Artificial Sequence
  synthetic polypeptide
QVQLVESGGGVVQPGRSLRLSCATSGFTFSDYGMHWVRQAPGKGLEWVAVIWYDGSNKYYADSVKGRFTISRDNSKKTLSLQMNSLRAEDTAVYYCARDSIMVRGDYWGQGTLVTVSS

SEQ ID NO: 32 - skipped

SEQ ID NO: 33 - protein, 107 aa, Artificial Sequence
  synthetic polypeptide
DIQMTQSPSSLSASVGDRVTITCRASQGISSWLAWYQQKPEKAPKSLIYAASSLQSGVPSRFSGSGSGTDFTLTISSLQPEDFATYYCQQYNSYPLTFGGGTKVEIK

SEQ ID NO: 34 - skipped

SEQ ID NO: 35 - protein, 5 aa, Artificial Sequence
  synthetic polypeptide
DYGMH

SEQ ID NO: 36 - protein, 17 aa, Artificial Sequence
  synthetic polypeptide
VIWYDGSNKYYADSVKG

SEQ ID NO: 37 - protein, 9 aa, Artificial Sequence
  synthetic polypeptide
DSIMVRGDY

SEQ ID NO: 38 - protein, 11 aa, Artificial Sequence
  synthetic polypeptide
RASQGISSWLA

SEQ ID NO: 39 - protein, 7 aa, Artificial Sequence
  synthetic polypeptide
AASSLQS

SEQ ID NO: 40 - protein, 9 aa, Artificial Sequence
  synthetic polypeptide
QQYNSYPLT

SEQ ID NO: 41 - protein, 118 aa, Artificial Sequence
  synthetic polypeptide
QVQLVESGGGVVQPGRSLRLSCAASGFTFSDHGMHWVRQAPGKGLEWVAVIWYDGSNKYYADSVKGRFTISRDNSKNTLYLQMNSLRAEDTAVYYCARDSIMVRGDYWGQGTLVTVSS

SEQ ID NO: 42 - skipped

SEQ ID NO: 43 - protein, 107 aa, Artificial Sequence; identical to SEQ ID NO: 33
  synthetic polypeptide

SEQ ID NO: 44 - skipped

SEQ ID NO: 45 - protein, 5 aa, Artificial Sequence
  synthetic polypeptide
DHGMH

SEQ ID NO: 46 - protein, 17 aa, Artificial Sequence
  synthetic polypeptide
VIWYDGSNKYYADSVKG

SEQ ID NO: 47 - protein, 9 aa, Artificial Sequence
  synthetic polypeptide
DSIMVRGDY

SEQ ID NO: 48 - protein, 11 aa, Artificial Sequence
  synthetic polypeptide
RASQGISSWLA

SEQ ID NO: 49 - protein, 7 aa, Artificial Sequence
  synthetic polypeptide
AASSLQS

SEQ ID NO: 50 - protein, 9 aa, Artificial Sequence
  synthetic polypeptide
QQYNSYPLT

SEQ ID NO: 51 - protein, 122 aa, Artificial Sequence
  synthetic polypeptide
QVQLQESGPGLVKPSETLSLTCTVSGGSVSSDYYYWSWIRQPPGKGLEWLGYIYYSGSTNYNPSLKSRVTISVDTSKNQFSLKLRSVTTADTAVYYCARGDGDYGGNCFDYWGQGTLVTVSS

SEQ ID NO: 52 - skipped

SEQ ID NO: 53 - protein, 107 aa, Artificial Sequence
  synthetic polypeptide
EIVLTQSPATLSLSPGERATLSCRASQSVSSYLAWYQQKPGQAPRLLIFDASNRATGIPARFSGSGSGTDFTLTISSLEPEDFAVYYCQQRSNWPLTFGGGTKVEIK

SEQ ID NO: 54 - skipped

SEQ ID NO: 55 - protein, 7 aa, Artificial Sequence
  synthetic polypeptide
SDYYYWS

SEQ ID NO: 56 - protein, 16 aa, Artificial Sequence
  synthetic polypeptide
YIYYSGSTNYNPSLKS

SEQ ID NO: 57 - protein, 12 aa, Artificial Sequence
  synthetic polypeptide
GDGDYGGNCFDY

SEQ ID NO: 58 - protein, 11 aa, Artificial Sequence
  synthetic polypeptide
RASQSVSSYLA

SEQ ID NO: 59 - protein, 7 aa, Artificial Sequence
  synthetic polypeptide
DASNRAT

SEQ ID NO: 60 - protein, 9 aa, Artificial Sequence
  synthetic polypeptide
QQRSNWPLT

SEQ ID NO: 61 - protein, 118 aa, Artificial Sequence
  synthetic polypeptide
QVQLVQSGAEVKKPGASVKVSCKASGYTFTNYGMNWVRQAPGQGLEWMGWINTYTGEPTYADAFKGRVTMTRDTSISTAYMELSRLRSDDTAVYYCARDYGDYGMDYWGQGTTVTVSS

SEQ ID NO: 62 - skipped

SEQ ID NO: 63 - protein, 112 aa, Artificial Sequence
  synthetic polypeptide
DIVMTQSPDSLAVSLGERATINCRASKSVSTSGYSFMHWYQQKPGQPPKLLIYLASNLESGVPDRFSGSGSGTDFTLTISSLQAEDVAVYYCQHSREVPWTFGQGTKVEIKR

SEQ ID NO: 64-65 - skipped (2 entries)

SEQ ID NO: 66 - protein, 112 aa, Artificial Sequence; identical to SEQ ID NO: 63
  synthetic polypeptide

SEQ ID NO: 67-68 - skipped (2 entries)

SEQ ID NO: 69 - protein, 112 aa, Artificial Sequence; identical to SEQ ID NO: 63
  synthetic polypeptide

SEQ ID NO: 70-71 - skipped (2 entries)

SEQ ID NO: 72 - protein, 112 aa, Artificial Sequence; identical to SEQ ID NO: 63
  synthetic polypeptide

SEQ ID NO: 73 - skipped

SEQ ID NO: 74 - protein, 118 aa, Artificial Sequence
  synthetic polypeptide
QVQLVQSGAEVKKPGASVKVSCKASGYTFTNYGMNWVRQAPGQGLEWMGWINTYTGEPTYADAFKGRVTMTTDTSTSTAYMELRSLRSDDTAVYYCARDYGDYGMDYWGQGTTVTVSS

SEQ ID NO: 75 - skipped

SEQ ID NO: 76 - protein, 112 aa, Artificial Sequence; identical to SEQ ID NO: 63
  synthetic polypeptide

SEQ ID NO: 77 - skipped

SEQ ID NO: 78 - protein, 137 aa, Artificial Sequence
  synthetic polypeptide
MAWVWTLLFLMAAAQSAGAQIQLVQSGPEVKKPGETVKISCKASGYTFTNYGMNWVKQAPGKGLKWMGWINTYTGEPTYADAFKGRFAFSLETSASTAYLQINNLKNEDTATYFCARDYGDYGMDYWGQGTSVTVSS

SEQ ID NO: 79 - skipped

SEQ ID NO: 80 - protein, 132 aa, Artificial Sequence
  synthetic polypeptide
METDTLLLWVLLLWVPGSTGDIVLTQSPASLAVSLGQRATISCRASKSVSTSGYSFMHWYQQKPGQPPKLLIYLASNLESGVPARFSGSGSGTDFTLNIHPVEEEDAATYYCQHSREVPWTFGGGTKLEIKR

SEQ ID NO: 81 - skipped

SEQ ID NO: 82 - protein, 118 aa, Artificial Sequence
  synthetic polypeptide
QIQLVQSGPEVKKPGETVKISCKASGYTFTNYGMNWVKQAPGKGLKWMGWINTYTGEPTYADAFKGRFAFSLETSASTAYLQINNLKNEDTATYFCARDYGDYGMDYWGQGTSVTVSS

SEQ ID NO: 83 - skipped

SEQ ID NO: 84 - protein, 112 aa, Artificial Sequence
  synthetic polypeptide
DIVLTQSPASLAVSLGQRATISCRASKSVSTSGYSFMHWYQQKPGQPPKLLIYLASNLESGVPARFSGSGSGTDFTLNIHPVEEEDAATYYCQHSREVPWTFGGGTKLEIKR

SEQ ID NO: 85 - skipped

SEQ ID NO: 86 - protein, 10 aa, Artificial Sequence
  synthetic polypeptide
GYTFTNYGMN

SEQ ID NO: 87 - protein, 17 aa, Artificial Sequence
  synthetic polypeptide
WINTYTGEPTYADAFKG

SEQ ID NO: 88 - protein, 9 aa, Artificial Sequence
  synthetic polypeptide
DYGDYGMDY

SEQ ID NO: 89 - protein, 15 aa, Artificial Sequence
  synthetic polypeptide
RASKSVSTSGYSFMH

SEQ ID NO: 90 - protein, 7 aa, Artificial Sequence
  synthetic polypeptide
LASNLES

SEQ ID NO: 91 - protein, 9 aa, Artificial Sequence
  synthetic polypeptide
QHSREVPWT

SEQ ID NO: 92 - protein, 118 aa, Artificial Sequence
  synthetic polypeptide
QVQLQQSGTELMTPGASVTMSCKTSGYTFSTYWIEWVKQRPGHGLEWIGEILGPSGYTDYNEKFKAKATFTADTSSNTAYMQLSSLASEDSAVYYCARWDRLYAMDYWGGGTSVTVSS

SEQ ID NO: 93 - skipped

SEQ ID NO: 94 - protein, 112 aa, Artificial Sequence
  synthetic polypeptide
DIVLTQSPASLTVSLGQKTTISCRASKSVSTSGYSFMHWYQLKPGQSPKLLIYLASDLPSGVPARFSGSGSGTDFTLKIHPVEEEDAATYYCQHSREIPYTFGGGTKLEITR

SEQ ID NO: 95 - skipped

SEQ ID NO: 96 - protein, 10 aa, Artificial Sequence
  synthetic polypeptide
GYTFSTYWIE

SEQ ID NO: 97 - protein, 16 aa, Artificial Sequence
  synthetic polypeptide
EILGPSGYTDYNEKFK

SEQ ID NO: 98 - protein, 9 aa, Artificial Sequence
  synthetic polypeptide
WDRLYAMDY

SEQ ID NO: 99 - protein, 15 aa, Artificial Sequence
  synthetic polypeptide
RASKSVSTSGYSFMH

SEQ ID NO: 100 - protein, 7 aa, Artificial Sequence
  synthetic polypeptide
LASNLPS

SEQ ID NO: 101 - protein, 9 aa, Artificial Sequence
  synthetic polypeptide
QHSREIPYT

SEQ ID NO: 102 - protein, 118 aa, Artificial Sequence
  synthetic polypeptide
QVQLVQSGAEVKKPGSSVKVSCKASGGTFSSYGFSWVRQAPGQGLEWMGGIIPIFGSANYAQKFQGRVTITADKSTSTVYMELISLRSEDTAVYYCARGGSSSPFAYWGQGTLVTVSS

SEQ ID NO: 103 - protein, 112 aa, Artificial Sequence
  synthetic polypeptide
DIVMTQNPLSSPVTLGQPASISCRSSQSLVHSDGNTYLSWLQQRPGQSPRLLIYKISNRFSGVPDRFSGSGAGTDFTLKISRVEAEDVGVYYCMQATQFPLTIGGGSKVEIK

SEQ ID NO: 104 - protein, 118 aa, Artificial Sequence
  synthetic polypeptide
QVQLVQSGAEVKKPGSSVKVSCKASGGTFSSYGFSWVRQAPGQGLEWMGGIIPIFGTANYAQKFQGRVTITADKSTSTVFMELISLRSEYTAVYYCARGGSSSPFAYWGQGTLVTVSS

SEQ ID NO: 105 - protein, 112 aa, Artificial Sequence
  synthetic polypeptide
DIVMTQTPLSSPVTLGQPASISCRSSQSLVHSDGNTYLSWLQQRPGQSPRLLIYKISNRFSGVPDRFSGSGAGTDFTLKISRVEAEDVGVYYCMQATQFPLTIGGGSKVEIK

SEQ ID NO: 106 - protein, 112 aa, Artificial Sequence
  synthetic polypeptide
QVQLQESGPGLVKPSETLSLTCTVSGGSISSYYWNWIRQPPGKGLEWIGYIYYSGSTNYNPSLKSRVTISVDTSKNQFSLKLRSVTAADTAVYYCARDIRTWGQGTLVTVSS

SEQ ID NO: 107 - protein, 107 aa, Artificial Sequence
  synthetic polypeptide
DIQMTQSPSSLSASVGDRVTITCRASQGISNYLAWFQQKPGKAPKSLIYAASSLQSGVPSKFSGSGSGTDFTLTISSLQPEDFATYYCQQYNSYPLTFGGGTKVEIK

SEQ ID NO: 108 - protein, 117 aa, Artificial Sequence
  synthetic polypeptide
EVQLVESGGGLVQPGGSLRLSCAASGFTFRNSWMSWVRQAPGKGLEWVANIKRDGSEKYYVDSVKGRFTISRDNAKNSLYLQMNSLRAEDTAVYYCARDQTGSFDYWGQGTLVTVSS

SEQ ID NO: 109 - protein, 112 aa, Artificial Sequence
  synthetic polypeptide
DVVMTQSPLSLPVTLGQPASISCRSSQSLVYSDENTYLNWFQQRPGQSLRRLIYQVSNRDSGVPDRFSGSGSGTDFTLKISRVEAEDVGVYFCMQGTYWPPTFGGGTKVEIK

SEQ ID NO: 110 - protein, 115 aa, Artificial Sequence
  synthetic polypeptide
QVQLRGSGPGLVKPSETLSLTCTVSDDSISVYYWSWIRQPAGKGLEWIGRVYSSGNINYNPSLESRVTMSVDTSKSRFSLNLSSVTAADTAVYYCARGLDAFDIWGQGTMVTVSS

SEQ ID NO: 111 - protein, 106 aa, Artificial Sequence
  synthetic polypeptide
EIVMTQSPATLSMSLGERATLSCRASQSVSSSLAWYQQKPGQAPRLLIYGASTRATGIPARFGGSGSGTEFTLTISSLQSEDFAVYYCQQYINWPHFGGGTKVEIK

SEQ ID NO: 112 - protein, 115 aa, Artificial Sequence
  synthetic polypeptide
EVQLLESGGGLVQPGESLRLSCEVSGFTFTSYAMSWVRQVPGKGLEWVSIISGVAFTTYYADSVKGRFTISRDHSKNTLYLQMNGLRAEDTAVYYCVKVDGEVYWGQGTLVTVSS

SEQ ID NO: 113 - protein, 107 aa, Artificial Sequence
  synthetic polypeptide
DIQMTQSPSSLSASVGDRVTITCQASQDISNYLNWYQQKPGKAPKILIYGASNLETGVPSRFSGSGSGTDFTFAISSLQPEDVATYYCQQYDNFPITFGQGTRLEIK

SEQ ID NO: 114 - protein, 117 aa, Artificial Sequence
  synthetic polypeptide
QVQLVQSGAEVKKPGSSVKVSCEASGGTFITYAISWVRQAPGQGLEWMGGIIPFFGTANYAQKFQGRVTITADKSTSTASMELRSLRSEDTAMYYCAQWELFFFDFWGQGTPVTVSS

SEQ ID NO: 115 - protein, 108 aa, Artificial Sequence
  synthetic polypeptide
EIVMTQSPDTLSVSPGERAILSCRASQSVSSNLAWYQQKPGQAPRLLIYSASTRASGIPARFSGSGSGTEFTLSISSLQSEDFAVYYCQQYDNWPPLTFGGGTKVEIK

SEQ ID NO: 116 - protein, 120 aa, Artificial Sequence
  synthetic polypeptide
AVQLVESGGGLVQPGGSLRLSCAASGFTFTYYSMNWVRQAPGKGLEWVSHISIRSSTIYFADSAKGRFTISRDNAKNSLYLQMNSLRDEDTAVYYCARGSGWYGDYFDYWGQGTLVTVSS

SEQ ID NO: 117 - protein, 108 aa, Artificial Sequence
  synthetic polypeptide
EIVLTQSPGTLSLSPGERATLSCRASQSVSSSYLAWYQQQPGQAPRLLIYGASSRATGIPDRFSGSGSGTDFTLTISRLEPEDFAIYYCQQYGSSPLTFGGGTKVEIK

SEQ ID NO: 118 - protein, 123 aa, Artificial Sequence
  synthetic polypeptide
QVTLKESGPVLVKPTETLTLTCTVSGFSLSNARMGVTWIRQPPGKALEWLAHIFSNDEKSYSTSLKSRLTISKDTSKTQVVLTMTNMDPVDTATYYCARIRDYYDISSYYDYWGQGTLVSVSS

SEQ ID NO: 119 - protein, 107 aa, Artificial Sequence
  synthetic polypeptide
DIQMTQSPSAMSASVGDRVTITCRASQDISNYLAWFQQKPGKVPKRLIYAASSLQSGVPSRFSGSGSGTEFTLTISSLLPEDFATYYCLQLNSFPFTFGGGTKVEIN

SEQ ID NO: 120 - protein, 119 aa, Artificial Sequence
  synthetic polypeptide
EVQLVESGGGLVQPGGSLRLSCAVSGFTFSNHNIHWVRQAPGKGLEWISYISRSSSTIYYADSVKGRFTISRDNAKNSLYLQMNSLRDEDTAVYYCARDHAQWYGMDVWGQGTTVTVSS

SEQ ID NO: 121 - protein, 107 aa, Artificial Sequence
  synthetic polypeptide
DIQMTQSPSSVSASVGDRVTITCRASQGISSWLAWYQQKPGKAPKVLIYAASSLQSGVPSRFSGSGSGTDFTLTISSLQPEDFATYYCQQAFSFPFTFGPGTKVDIK

SEQ ID NO: 122 - protein, 124 aa, Artificial Sequence
  synthetic polypeptide
EVQLVESGGGLVQPGGSLRLSCVASGFTFSSYWMSWVRQAPGKGLEWVASIKQDGSEKYYVDSVKGRFTISRDNAKNSVYLQMNSLRAEDTGVYYCAREGVNWGWRLYWHFDLWGRGTLVTVSS

SEQ ID NO: 123 - protein, 112 aa, Artificial Sequence
  synthetic polypeptide
DIVMTQSPDSLAVSLGERATINCKSSQSVLYSYNNKNYVAWYQQKPGQPPNLLIFWASTRESGVPDRFSGSGSGTDFTLTISSLQAEDVAVYYCQQYYSTLTFGGGTKVEIK

SEQ ID NO: 124 - protein, 120 aa, Artificial Sequence
  synthetic polypeptide
EVQVVESGGGLVQPGGSLRLSCAASGFTFSSYSMNWVRQAPGKGLEWVSHSSISRGNIYFADSVKGRFTISRDNAKNSLYLQMNSLRDEDTAVYYCARGSGWYGDYFDYWGQGTLVTVSS

SEQ ID NO: 125 - protein, 108 aa, Artificial Sequence
  synthetic polypeptide
EIVLTQSPGTLSLSPGERVTLSCRASQSVSSSYLAWYQQKPGQAPRLLIYDASSRATGIPDRFSGSGSGTDFTLTISRLEPEDFAVYYCQQYGSSPLTFGGGTKVEIK

SEQ ID NO: 126 - protein, 120 aa, Artificial Sequence
  synthetic polypeptide
EVQLLESGGGLVQPGGSLRLSCAASGFAFSNYAMSWVRQAPGKGLEWVSAIRGGGGSTYYADSVKGRFTISRDNSKNTLYLQMNSLRAEDTAVYYCARDFISGTWYPDYWGQGTLVTVSS

SEQ ID NO: 127 - protein, 112 aa, Artificial Sequence
  synthetic polypeptide
ELQSVLTQPPSASGTPGQRVTISCSGSSSNIGSNYVYWYQQLPGTAPKLLIYRNNQRPSGVPDRFSGSKSGTSASLAISGLRSEDEADYYCAAWDDSLSGVVFGGGTKLTVL

SEQ ID NO: 128 - protein, 122 aa, Artificial Sequence
  synthetic polypeptide
EVQLVQSGAEVKKPGESLKISCKGSGYRFTSYWIGWVRQMPGKGLEWMGSIYPDDSDTRYSPSFQGQVTISADKSISTAYLQWSSLKASDTAMYYCASSTVDYPGYSYFDYWGQGTLVTVSS

SEQ ID NO: 129 - protein, 112 aa, Artificial Sequence
  synthetic polypeptide
ELQSVLTQPPSASGTPGQRVTISCSGSRSNIGSNYVYWYQQLPGTAPKLLIYRNNQRPSGVPDRFSGSKSGTSASLAISGLRSEDEADYYCASWDGSLSAVVFGTGTKLTVL

SEQ ID NO: 130 - protein, 123 aa, Artificial Sequence
  synthetic polypeptide
EVQLVQSGAEVKKPGESLKISCKGSGYTFTNYWIAWVRQMPGKGLEWMGIIYPDGSDTRYSPSFQGQVTISADKSISTAYLQWSSLKASDTAMYYCARDITSWYYGEPAFDIWGQGTLVTVSS

SEQ ID NO: 131 - protein, 112 aa, Artificial Sequence
  synthetic polypeptide
ELQSVLTQPPSASGTPGQRVTISCSGSSSNIGSNYVYWYQQLPGTAPKLLIYRNNQRPSGVPDRFSGSKSGTSASLAISGLRSEDEADYYCATWDDSLGSPVFGTGTKLTVL

SEQ ID NO: 132 - protein, 122 aa, Artificial Sequence
  synthetic polypeptide
EVQLVQSGAEVKKPGESLKISCKGSGYSFTSSWIGWVRQMPGKGLEWMGIIYPGDSDTRYSPSFQGQVTISADKSISTAYLQWSSLKASDTAMYYCAKGLSQAMTGFGFDYWGQGTLVTVSS

SEQ ID NO: 133 - protein, 110 aa, Artificial Sequence
  synthetic polypeptide
ELDIQMTQSPSSLSASVGDRVTITCRASQSISRYLNWYQQKPGKAPKLLIYAASILQTGVPSRFSGSGSGTDFTLTISSLQPEDFATYYCQQSYSTTMWTFGQGTKVEIK

SEQ ID NO: 134 - protein, 122 aa, Artificial Sequence
  synthetic polypeptide
EVQLVQSGAEVKKPGESLKISCKGSGYGFTSYWIGWVRQMPGKGLEWMGIIHPDDSDTKYSPSFQGQVTISADKSISTAYLQWSSLKASDTAMYYCASSYLRGLWGGYFDYWGQGTLVTVSS

SEQ ID NO: 135 - protein, 113 aa, Artificial Sequence
  synthetic polypeptide
ELQSVLTQPPSASGTPGQRVTISCSGSSSNIGSNYVNWYQQLPGTAPKLLIYGDYQRPSGVPDRFSGSKSGTSASLAISGLRSEDEADYYCATRDDSLSGSVVFGTGTKLTVL

SEQ ID NO: 136 - protein, 126 aa, Artificial Sequence
  synthetic polypeptide
EVQLVQSGAEVKKPGESLKISCKGSGYTFPSSWIGWVRQMPGKGLEWMGIIYPDTSHTRYSPSFQGQVTISADKSISTAYLQWSSLKASDTAMYYCARASYFDRGTGYSSWWMDVWGQGTLVTVSS

SEQ ID NO: 137 - protein, 110 aa, Artificial Sequence
  synthetic polypeptide
ELDIQMTQSPSSLSASVGDRVTITCRASQSIYDYLHWYQQKPGKAPKLLIYDASNLQSGVPSRFSGSGSGTDFTLTISSLQPEDFATYYCQQSYTTPLFTFGQGTKVEIK

SEQ ID NO: 138 - protein, 123 aa, Artificial Sequence
  synthetic polypeptide
EVQLLESGGGLVQPGGSLRLSCAASGFTFSQYSMSWVRQAPGKGLEWVSAISGGGVSTYYADSVKGRFTISRDNSKNTLYLQMNSLRAEDTAVYYCASDISDSGGSHWYFDYWGQGTLVTVSS

SEQ ID NO: 139 - protein, 110 aa, Artificial Sequence
  synthetic polypeptide
ELDIQMTQSPSSLSASVGDRVTITCRASQYIGRYLNWYQQKRGKAPKLLIHGATSLASGVPSRFSGSGSGTDFTLTISSLQPEDFATYYCQQSYSTTSPTFGQGTKVEIK

SEQ ID NO: 140 - protein, 121 aa, Artificial Sequence
  synthetic polypeptide
EVQLLESGGGLVQPGGSLRLSCAASGFTFSSYAMSWVRQAPGKGLEWVSTISGTGGTTYYADSVKGRFTISRDNSKNTLYLQMNSLRAEDTAVYYCAKVRAGIDPTASDVWGQGTLVTVSS

SEQ ID NO: 141 - protein, 112 aa, Artificial Sequence
  synthetic polypeptide
ELQSVLTQPPSASGTPGQRVTISCSGSTSNIGRNYVYWYQQLPGTAPKLLIYRTNQRPSGVPDRFSGSKSGTSASLAISGLRSEDEADYYCAAWDDSLSGRVFGTGTKLTVL

SEQ ID NO: 142 - protein, 124 aa, Artificial Sequence
  synthetic polypeptide
EVQLLESGGGLVQPGGSLRLSCAASGFTFNNFAMSWVRQAPGKGLEWVSGISGSGDNTYYADSVKGRFTISRDNSKNTLYLQMNSLRAEDTAVYYCAKDRDIGLGWYSYYLDVWGQGTLVTVSS

SEQ ID NO: 143 - protein, 112 aa, Artificial Sequence
  synthetic polypeptide
ELQSVLTQPPSASGTPGQRVTISCSGSSSNIGSNYVYWYQQLPGTAPKPLIYMNNQRPSGVPDRFSGSKSGTSASLAISGLRSEDEADYYCAAWDDSLSAVVFGTGTKLTVL

SEQ ID NO: 144 - protein, 119 aa, Artificial Sequence
  synthetic polypeptide
QVQLVQSGAEVKKPGSSVKVSCKASGGTFSSYAISWVRQAPGQGLEWMGEIIPIFGTASYAQKFQGRVTITADESTSTAYMELSSLRSEDTAVYYCARAGWDDSWFDYWGQGTLVTVSS

SEQ ID NO: 145 - protein, 113 aa, Artificial Sequence
  synthetic polypeptide
ELQSVLTQPPSASGTPGQRVTISCSGSNSNIGTNYVSWYQQLPGTAPKLLIYRSSRRPSGVPDRFSGSKSGTSASLAISGLRSEDEADYYCAAWDGSLSGHWVFGTGTKLTVL

SEQ ID NO: 146 - protein, 122 aa, Artificial Sequence
  synthetic polypeptide
EVQLVQSGAEVKKPGESLKISCKGSGYSFASYWIGWVRQMPGKGLEWMGVIYPGTSETRYSPSFQGQVTISADKSISTAYLQWSSLKASDTAMYYCAKGLSASASGYSFQYWGQGTLVTVSS

SEQ ID NO: 147 - protein, 110 aa, Artificial Sequence
  synthetic polypeptide
ELDIQMTQSPSSLSASVGDRVTITCRASQSIDTYLNWYQQKPGKAPKLLIYSASSLHSGVPSRFSGSGSGTDFTLTISSLQPEDFATYYCQQSYSTTAWTFGQGTKVEIK

SEQ ID NO: 148 - protein, 124 aa, Artificial Sequence
  synthetic polypeptide
EVQLVQSGAEVKKPGESLKISCKGSGYSFTDYWIGWVRQMPGKGLEWMGMISPGGSTTIYRPSFQGQVTISADKSISTAYLQWSSLKASDTAMYYCAREMYTGGYGGSWYFDYWGQGTLVTVSS

SEQ ID NO: 149 - protein, 109 aa, Artificial Sequence
  synthetic polypeptide
ELDIQMTQSPSSLSASVGDRVTITCRASQSIGQSLNWYQQKPGKAPKLLIYGASSLQSGVPSRFSGSGSGTDFTLTISSLQPEDFATYYCQQSYSTPITFGQGTKVEIK

SEQ ID NO: 150 - protein, 118 aa, Artificial Sequence
  synthetic polypeptide
QVQLQESGPGLVKPSETLSLTCTVSGGSISYYYWTWIRQPPGKGLEWIGHIYYSGSTNYNPSLKSRVTISIDTSKNLFSLKLSSVTAADTAVYYCARAEGSLDAFDFWGQGTMVTVSS

SEQ ID NO: 151 - protein, 107 aa, Artificial Sequence
  synthetic polypeptide
DIQMTQSPSTLSASVGDRVTITCRASQSISTWLAWYQQKPGKAPKVLIYKASSLESGVPSRFSGSGSGTEFILTINSLQPDDFASYYCQQYKSYSHTFGQGTKLEIK

SEQ ID NO: 152 - protein, 113 aa, Artificial Sequence
  synthetic polypeptide
EVQLVESGGGLIQPGGSLRLSCAASGFTVSSNYMTWVRQAPGKGLEWVSVIYSGGSTYYADSVKGRFTISRDNSKNTLYLQMNSLRAEDTAVYYCARNWGDYWGQGTLVTVSS

SEQ ID NO: 153 - protein, 107 aa, Artificial Sequence
  synthetic polypeptide
DIQMTQSPSTLSASVGDRVTITCRASQSISSWLAWYQQKPGKAPKVLIYKASSLESGVPSRFSGSGSGTEFTLTINSLQPDDFATYYCQQYKSFSLTFGQGTKLEIK

SEQ ID NO: 154 - protein, 118 aa, Artificial Sequence
  synthetic polypeptide
QVQLQESGPGLVKPSGTLSLTCTVSGGSIDYYFWNWFRQSPVKGLEWIGHVYDIGNTKYNPSLKSRVTISIDTSENQFSLKLNSVTAADTAVYYCARGEGALDAFDIWGQGTMVTVSS

SEQ ID NO: 155 - protein, 107 aa, Artificial Sequence
  synthetic polypeptide
DIQMTQSPSTLSASVGDRVTITCRASQSISSWLAWYQQKPGKAPKVLIYKASTLESGVPSRFSGSGSGTEFTLTISSLQPDDFATYYCQQYNSYSYTFGHGTKLEIK

SEQ ID NO: 156 - protein, 118 aa, Artificial Sequence
  synthetic polypeptide
QVQLQESGPGLVKPSETLSLNCTVSGGSISYYYWTWIRQPPGKGLEWIGHVIYSGTTNYNPSLKSRVTISVDTSKNQFSLKLNSVTAADTAVYYCVRAEGSLDAFDLWGQGTMVTVSS

SEQ ID NO: 157 - protein, 107 aa, Artificial Sequence
  synthetic polypeptide
DIQMTQSPSILSASVGDRVTITCRASQSVSSWLAWYQQKPGKAPKVLIYKASSLESGVPSRFSGTGSGTEFTLTISSLQSDDFATYYCQQYNTYSHTFGQGTKLEIK

SEQ ID NO: 158 - protein, 120 aa, Artificial Sequence
  synthetic polypeptide
QVQLVESGGGVVQPGRSLRLSCVASGFTFSDYGIHWVRQAPGMGQEWVAVIWYDGSIKKYSDSVKGRFIISRDNSENTVYLQMNSLRGEDTAIYYCARDEVGTFGAFDFWGQGTKVTVSS

SEQ ID NO: 159 - protein, 107 aa, Artificial Sequence
  synthetic polypeptide
AIQMTQSPSSLSASVGDRVTITCRASQGIRNDLGWYQQKPGKAPKLLIYAASSLQSGVPSRFSGSGSGTDFTLTISSLQPEDFATYYCLQDYNYPFTFGPGTKVDIK

SEQ ID NO: 160 - protein, 118 aa, Artificial Sequence
  synthetic polypeptide
QVQLQESGPGLVKPLQTLSLTCTVSGGSISSDGYYWSWIRQNPGKGLEWIGYMYYSGSTYYNPSLKSRVTISVDTSKNQFSLKLRSVTAADTAVYYCTRDFGWYFDLWGRGTLVTVSS

SEQ ID NO: 161 - protein, 107 aa, Artificial Sequence
  synthetic polypeptide
DIQMTQSPSSLSASVGDSITITCRASQDIDNYLAWYQQKTGKVPKVLIYAASALQSGVPSRFSGSGSGTDFTLTISSLQPEDVATYYCQNYNSGPRTFGQGTKVEIK

SEQ ID NO: 162 - protein, 118 aa, Artificial Sequence
  synthetic polypeptide
QVQLQESGPGLVKPSQSLSLTCSVSGGSVSSDGYYWSWIRQHPGKGLEWIGYIYYRRITDYNPSLKSRVNISLDTSKNQFSLKLSSVTAADTAVYYCARDFGWYFDLWGRGTLVAVSS

SEQ ID NO: 163 - protein, 107 aa, Artificial Sequence
  synthetic polypeptide
DIQMTQSPSSLSASVGDRVTITCRASQDISNYLTWYQQKPGRVPEVLIYAASALQSGVPSRFSGSGSGTDFTLTISSLQPEDVATYYCQNYNSAPRTFGQGTKVEIK

SEQ ID NO: 164 - protein, 122 aa, Artificial Sequence
  synthetic polypeptide
QVQLVQSGAEVKKPGASVKVSCKASGYTFTGYYLHWVRQAPGQGLEWMGWINPNSGGTNYAQKFQGRVTMTRDTSITTAYMELSRLRIDDTAVYYCARDRGVTMIVDGMDDWGQGTTVTVSS

SEQ ID NO: 165 - protein, 112 aa, Artificial Sequence
  synthetic polypeptide
DIVMTQSPLSLPVTPGEPASISCRSSQSLLHSNGYNYLDWYLQKPGQSPQVLILLGSNRASGVPDRVSASGSGTDFTLKISRMQAEDVGIYYCMQTLQTPFTFGQGTKLEIK

SEQ ID NO: 166 - protein, 120 aa, Artificial Sequence
  synthetic polypeptide
EVELVESGGGMVQPGRSLRLSCAASGFTFSDYGMHWVRQAPGMGLEWVTVIWYDGSNKYYADSVKGRFTISRDNSKNTVFLQMNSLRAEDTAVYYCARDEVGFVGAFDIWGQGTMVTVSS

SEQ ID NO: 167 - protein, 107 aa, Artificial Sequence
  synthetic polypeptide
DIQLTQSPSFLSASVGDRVIITCRASQGINSHLAWYQQKPGKAPKLLIYYASTLPSGVPSRFSGSGSGTEFTLTVTSLQPEDFATYYCQQLNHYPITFGQGTRLDIN

SEQ ID NO: 168 - protein, 118 aa, Artificial Sequence
  synthetic polypeptide
QVQLQESGPGLVKPSQTLSLTCTVSGGSISSDGYYWSWIRQHPGKGLEWIGYMYYSGITYHNPSLKSRVTISVDTSKNQFSLRLSSVTAADTAVYYCARDFGWYFDLWGRGTLVTVSS

SEQ ID NO: 169 - protein, 107 aa, Artificial Sequence
  synthetic polypeptide
DIQMTQSPSSLSASVGDRVTITCRASQGISNYLAWYQQKPGKVPKLLIYAASTLHSGVPSRFSGSGSGTDFTLTISSLQPEDVATYYCQKYNSAPRTFGQGTKVEIK

SEQ ID NO: 170 - protein, 118 aa, Artificial Sequence
  synthetic polypeptide
QVQLQESGPGLVKPSQTLSLTCTVSGGSISSDAYYWSWIRQHPGKGLEWIGYMYYSGITYYNPSLKSRVTISVDTSKNQFSLKLSSVTAADTAVYYCARDFGWYFDLWGRGTLVTVSS

SEQ ID NO: 171 - protein, 107 aa, Artificial Sequence
  synthetic polypeptide
DIQMTQSPSSLSASVGDRVTITCRASQDISNYLAWYQQKPGKVPKLLIYAASTLHSGVPSRFSGSGSGTDFTLTISSLQPDDFAAYYCQKYNSAPRTFGQGTKVEIK

SEQ ID NO: 172 - protein, 120 aa, Artificial Sequence; identical to SEQ ID NO: 158
  synthetic polypeptide

SEQ ID NO: 173 - protein, 107 aa, Artificial Sequence
  synthetic polypeptide
DIQLTQSPSFLSASVGDRVSITCRASQDISSFLAWYQQKPGKAPVLLIYVASTLQSGVPSRFSGSGSGTEFTLTVSSLQPEDFATYYCQQLHVYPITFGQGTRLEIR

SEQ ID NO: 174 - protein, 122 aa, Artificial Sequence
  synthetic polypeptide
EVQLVESGGGLVKPGGSLRLSCAASGFTFSNAWMSWVRQAPGKGLEWVGRIKSKTGGGTTDYAAPVKGRFTISRDDSKNTLYLQMNSLKTEDTAVYYCTSLIVGAISLFDYWGQGTLVTVSS

SEQ ID NO: 175 - protein, 113 aa, Artificial Sequence
  synthetic polypeptide
DIVMTQTPLSLPVTPGEPASISCRSSQSLLDSDDGNTYLDWYLQKPGQSPQLLIYTLSYRASGVPDRFSGSGSGTDFTLKISRVEAEDVGVYYCMQRIEFPFTFGPGTKVDIK

SEQ ID NO: 176 - protein, 118 aa, Artificial Sequence
  synthetic polypeptide
QVQLRESGPGLVKPSETLSLTCTISGGSISYYFWTWIRQPPGRGLEWIGQIYYSGNTNSNPSLKSRVTISIDTSKNQFSLKLTSVTVADTAVYYCVRAEGSLDAFDIWGQGTMVAVSS

SEQ ID NO: 177 - protein, 107 aa, Artificial Sequence
  synthetic polypeptide
DIQMTQSPSALSASVGDRVAITCRASQTISTWLAWYQQKPGKAPKVLIYKASNLESGVPSRFSGSGSGTEFTLTINSLQPDDFATYYCQQYQTFSHTFGQGTKLEIK

SEQ ID NO: 178 - protein, 122 aa, Artificial Sequence
  synthetic polypeptide
EVQLVESGGGLVKPGGSLRLSCVASGFTFSSYSMNWVRQFPGKGLEWVSSISTSSNYIHYADSLQGRFTISRDNAKNSLYLQMSSLRVEDTAVYYCVRDKGTTLTNWYFDLWGRGTLVTVSS

SEQ ID NO: 179 - protein, 107 aa, Artificial Sequence
  synthetic polypeptide
DMQMTQSPSSLSASVGDRVTLTCRASQGISNYLAWFQLKPGKVPKLLIYAASTLQSGVPSRFSGSGSGTDFALTISSLQPEDVATYYCQKYNSAPLTFGGGTKVEIK

SEQ ID NO: 180 - protein, 121 aa, Artificial Sequence
  synthetic polypeptide
QVQLVESGGGVVQPGRSLRLSCGASGFTFSSYGMHWVRQAPGKGLEWVAVIWYDGSNKYYADSLKGRFTISRDNSKNTLYLQMNSLRAEDTAVYYCARDGYSGSSDAFDIWGQGTMVTVSS

SEQ ID NO: 181 - protein, 112 aa, Artificial Sequence
  synthetic polypeptide
DIVMTQSPLSLPVTPGEPASISCRSSQTLVHSNGYNYLNWYLQKPGQSPQLLIYLGSNRASGVPDRFSGSGSGSDFTLKISRMEAEDVGVYYCMQAIQTPYTFGQGTNVEIK

SEQ ID NO: 182 - protein, 118 aa, Artificial Sequence
  synthetic polypeptide
QVQLQESGPGLVQPSETLSLTCTVSGGSISYYYWSWIRQPPGKGLEWIGNINYMGNTIYNPSLKSRVTISVDTSKDQFSLKLTSVSAADTAVYYCVRAEGSLDAFDFWGQGTLVAVSL

SEQ ID NO: 183 - protein, 107 aa, Artificial Sequence
  synthetic polypeptide
DIQMTQSPSTLSASVGDRVTITCRASQSISSWLAWYQQKPGKAPKVLIYKASNLESGVPSRFSGSGSGTEFTLTISSLQPDDFATYYCQQYNSYSCTFGQGTKLEIK

SEQ ID NO: 184 - protein, 123 aa, Artificial Sequence
  synthetic polypeptide
QVQLVQSGAEVTKPGASVKVSCKASGYIFTGYYIYWVRQAPGQGLEWMGWINPSSGGTNYAQKFQGRVTMARDTSISTAYMELSSLRSDDTAVYYCARDRKREYYYNFGMDVWGQGTTVTVST

SEQ ID NO: 185 - protein, 107 aa, Artificial Sequence
  synthetic polypeptide
DIQMTQSPSSLSASVGDRIIFTCQASQDINNYLHWYQQKPGKAPKLLIYDASDWETGVPSRFSGSGSGTDFTFTISSLQPEDIATYYCQQYDHLPITFGQGTRVEIK

SEQ ID NO: 186 - protein, 123 aa, Artificial Sequence
  synthetic polypeptide
QVQLVQSGAEVTKPGASVKVSCKASGYTFTSHYIYWVRQAPGQGLEWMGWINPNSGGTNYAQKFQDRVTMARDTSISTAYMELSRLRSDDTAVYYCAKDRKREYYYNFGMDVWGQGTTVTVSA

SEQ ID NO: 187 - protein, 107 aa, Artificial Sequence
  synthetic polypeptide
DIQMTQSPSSLSASVGDRVILTCQASQDISNYLHWYQQKPGKAPKLLIYDASDLETGVPSRFSGSGSGADFTFTISNLQPEDFATYYCQQYDHLPITFGQGTRLEIK

SEQ ID NO: 188 - protein, 123 aa, Artificial Sequence
  synthetic polypeptide
QVQLVQFGVEVRKPGASVKVSCKVSGFTFTSHYIYWVRQAPGQGLEWMGWINPNSGGTKYAQKFQDRVTMARDTSISTAYMELSRLRSDDTSVYYCVKDRKREYYYNFGMDVWGQGTTVTVSS

SEQ ID NO: 189 - protein, 107 aa, Artificial Sequence; identical to SEQ ID NO: 187
  synthetic polypeptide

SEQ ID NO: 190 - protein, 119 aa, Artificial Sequence
  synthetic polypeptide
EVQMLESGGGLIQPGGSLRLSCKTSGFTLSIYAIHWVRQAPGRGLEWVSSFGGRGSSTYFADSVKGRFTISRDASENSLYLHMNSLRAEDTAVYYCAKEKDWGRGFDYWGQGTLVTVSS

SEQ ID NO: 191 - protein, 107 aa, Artificial Sequence
  synthetic polypeptide
DIQMTQSPSSLSASVGDRVTITCQASQDISNYLNWYQQKPGKAPKLLIYDASNLETGVPSRFSGSGSGTDFTFTISSLQPEDIATYYCQQYDNLPYTFGQGTKLEIK

SEQ ID NO: 192 - protein, 122 aa, Artificial Sequence
  synthetic polypeptide
EVQLVESGGGLVKPGGSLRLSCAASGFTFSNYSMNWVRQAPGKGLEWVSSISSSTIYIYYADSVKGRFTISRDNAKKSLYLQMNSLRAEDTAVYYCARDIGWEVFTLGFDYWGQGTQVTVSS

SEQ ID NO: 193 - protein, 112 aa, Artificial Sequence
  synthetic polypeptide
DIVMTQSPLSLPVTPGEPASISCRSSQSLLYSNGYNYLDWYLQKPGQSPQLLIFLNSNRASGVPDRFSGSGSGTDFTLKISRVEAEDVGVYFCMQALQTPLTFGGGTKVEIK

SEQ ID NO: 194 - protein, 120 aa, Artificial Sequence; identical to SEQ ID NO: 166
  synthetic polypeptide

SEQ ID NO: 195 - protein, 107 aa, Artificial Sequence
  synthetic polypeptide
DIQLTQSPSFLSASVGDRVIITCRASQGINSHLAWYQQKPGKAPKLLIYYASTLPSGVPSRFSGSGSGTEFTLTVTSLQPEDFATYYCQQLNHYPITFGQGTRLEIK

SEQ ID NO: 196 - protein, 5 aa, Artificial Sequence
  synthetic polypeptide
SYGFS

SEQ ID NO: 197 - protein, 17 aa, Artificial Sequence
  synthetic polypeptide
GIIPIFGSANYAQKFQG

SEQ ID NO: 198 - protein, 9 aa, Artificial Sequence
  synthetic polypeptide
GGSSSPFAY

SEQ ID NO: 199 - protein, 7 aa, Artificial Sequence
  synthetic polypeptide
GGTFSSY

SEQ ID NO: 200 - protein, 6 aa, Artificial Sequence
  synthetic polypeptide
IPIFGS

SEQ ID NO: 201 - protein, 10 aa, Artificial Sequence
  synthetic polypeptide
GGTFSSYGFS

SEQ ID NO: 202 - protein, 5 aa, Artificial Sequence
  synthetic polypeptide
SYGFS

SEQ ID NO: 203 - protein, 17 aa, Artificial Sequence
  synthetic polypeptide
GIIPIFGTANYAQKFQG

SEQ ID NO: 204 - protein, 9 aa, Artificial Sequence
  synthetic polypeptide
GGSSSPFAY

SEQ ID NO: 205 - protein, 7 aa, Artificial Sequence
  synthetic polypeptide
GGTFSSY

SEQ ID NO: 206 - protein, 6 aa, Artificial Sequence
  synthetic polypeptide
IPIFGT

SEQ ID NO: 207 - protein, 10 aa, Artificial Sequence
  synthetic polypeptide
GGTFSSYGFS

SEQ ID NO: 208 - protein, 5 aa, Artificial Sequence
  synthetic polypeptide
SYYWN

SEQ ID NO: 209 - protein, 16 aa, Artificial Sequence
  synthetic polypeptide
YIYYSGSTNYNPSLKS

SEQ ID NO: 210 - protein, 5 aa, Artificial Sequence
  synthetic polypeptide
DIRTW

SEQ ID NO: 211 - protein, 7 aa, Artificial Sequence
  synthetic polypeptide
GGSISSY

SEQ ID NO: 212 - protein, 5 aa, Artificial Sequence
  synthetic polypeptide
YYSGS

SEQ ID NO: 213 - protein, 10 aa, Artificial Sequence
  synthetic polypeptide
GGSISSYYWN

SEQ ID NO: 214 - protein, 5 aa, Artificial Sequence
  synthetic polypeptide
NSWMS

SEQ ID NO: 215 - protein, 17 aa, Artificial Sequence
  synthetic polypeptide
NIKRDGSEKYYVDSVKG

SEQ ID NO: 216 - protein, 8 aa, Artificial Sequence
  synthetic polypeptide
DQTGSFDY

SEQ ID NO: 217 - protein, 7 aa, Artificial Sequence
  synthetic polypeptide
GFTFRNS

SEQ ID NO: 218 - protein, 6 aa, Artificial Sequence
  synthetic polypeptide
KRDGSE

SEQ ID NO: 219 - protein, 10 aa, Artificial Sequence
  synthetic polypeptide
GFTFRNSWMS

SEQ ID NO: 220 - protein, 5 aa, Artificial Sequence
  synthetic polypeptide
VYYWS

SEQ ID NO: 221 - protein, 15 aa, Artificial Sequence
  synthetic polypeptide
VYSSGNINYNPSLES

SEQ ID NO: 222 - protein, 7 aa, Artificial Sequence
  synthetic polypeptide
GLDAFDI

SEQ ID NO: 223 - protein, 7 aa, Artificial Sequence
  synthetic polypeptide
DDSISVY

SEQ ID NO: 224 - protein, 5 aa, Artificial Sequence
  synthetic polypeptide
YSSGN

SEQ ID NO: 225 - protein, 10 aa, Artificial Sequence
  synthetic polypeptide
DDSISVYYWS

SEQ ID NO: 226 - protein, 5 aa, Artificial Sequence
  synthetic polypeptide
SYAMS

SEQ ID NO: 227 - protein, 16 aa, Artificial Sequence
  synthetic polypeptide
RVYSSGNINYNPSLES

SEQ ID NO: 228 - protein, 7 aa, Artificial Sequence
  synthetic polypeptide
GLDAFDI

SEQ ID NO: 229 - protein, 7 aa, Artificial Sequence
  synthetic polypeptide
GFTFTSY

SEQ ID NO: 230 - protein, 5 aa, Artificial Sequence
  synthetic polypeptide
YSSGN

SEQ ID NO: 231 - protein, 10 aa, Artificial Sequence
  synthetic polypeptide
GFTFTSYAMS

SEQ ID NO: 232 - protein, 5 aa, Artificial Sequence
  synthetic polypeptide
TYAIS

SEQ ID NO: 233 - protein, 17 aa, Artificial Sequence
  synthetic polypeptide
GIIPFFGTANYAQKFQG

SEQ ID NO: 234 - protein, 8 aa, Artificial Sequence
  synthetic polypeptide
WELFFFDF

SEQ ID NO: 235 - protein, 7 aa, Artificial Sequence
  synthetic polypeptide
GGTFITY

SEQ ID NO: 236 - protein, 6 aa, Artificial Sequence
  synthetic polypeptide
IPFFGT

SEQ ID NO: 237 - protein, 10 aa, Artificial Sequence
  synthetic polypeptide
GGTFITYAIS

SEQ ID NO: 238 - protein, 5 aa, Artificial Sequence
  synthetic polypeptide
YYSMN

SEQ ID NO: 239 - protein, 17 aa, Artificial Sequence
  synthetic polypeptide
HISIRSSTIYFADSAKG

SEQ ID NO: 240 - protein, 11 aa, Artificial Sequence
  synthetic polypeptide
GSGWYGDYFDY

SEQ ID NO: 241 - protein, 7 aa, Artificial Sequence
  synthetic polypeptide
GFTFTYY

SEQ ID NO: 242 - protein, 6 aa, Artificial Sequence
  synthetic polypeptide
SIRSST

SEQ ID NO: 243 - protein, 7 aa, Artificial Sequence
  synthetic polypeptide
GFTFTYY

SEQ ID NO: 244 - protein, 7 aa, Artificial Sequence
  synthetic polypeptide
NARMGVT

SEQ ID NO: 245 - protein, 16 aa, Artificial Sequence
  synthetic polypeptide
HIFSNDEKSYSTSLKS

SEQ ID NO: 246 - protein, 13 aa, Artificial Sequence
  synthetic polypeptide
IRDYYDISSYYDY

SEQ ID NO: 247 - protein, 9 aa, Artificial Sequence
  synthetic polypeptide
GFSLSNARM

SEQ ID NO: 248 - protein, 5 aa, Artificial Sequence
  synthetic polypeptide
FSNDE

SEQ ID NO: 249 - protein, 12 aa, Artificial Sequence
  synthetic polypeptide
GFSLSNARMGVT

SEQ ID NO: 250 - protein, 5 aa, Artificial Sequence
  synthetic polypeptide
NHNIH

SEQ ID NO: 251 - protein, 17 aa, Artificial Sequence
  synthetic polypeptide
YISRSSSTIYYADSVKG

SEQ ID NO: 252 - protein, 10 aa, Artificial Sequence
  synthetic polypeptide
DHAQWYGMDV

SEQ ID NO: 253 - protein, 7 aa, Artificial Sequence
  synthetic polypeptide
GFTFSNH

SEQ ID NO: 254 - protein, 6 aa, Artificial Sequence
  synthetic polypeptide
SRSSST

SEQ ID NO: 255 - protein, 10 aa, Artificial Sequence
  synthetic polypeptide
GFTFSNHNIH

SEQ ID NO: 256 - protein, 5 aa, Artificial Sequence
  synthetic polypeptide
SYWMS

SEQ ID NO: 257 - protein, 17 aa, Artificial Sequence
  synthetic polypeptide
SIKQDGSEKYYVDSVKG

SEQ ID NO: 258 - protein, 15 aa, Artificial Sequence
  synthetic polypeptide
EGVNWGWRLYWHFDL

SEQ ID NO: 259 - protein, 7 aa, Artificial Sequence
  synthetic polypeptide
GFTFSSY

SEQ ID NO: 260 - protein, 6 aa, Artificial Sequence
  synthetic polypeptide
KQDGSE

SEQ ID NO: 261 - protein, 10 aa, Artificial Sequence
  synthetic polypeptide
GFTFSSYWMS

SEQ ID NO: 262 - protein, 5 aa, Artificial Sequence
  synthetic polypeptide
SYSMN

SEQ ID NO: 263 - protein, 17 aa, Artificial Sequence
  synthetic polypeptide
HSSISRGNIYFADSVKG

SEQ ID NO: 264 - protein, 11 aa, Artificial Sequence
  synthetic polypeptide
GSGWYGDYFDY

SEQ ID NO: 265 - protein, 7 aa, Artificial Sequence
  synthetic polypeptide
GFTFSSY

SEQ ID NO: 266 - protein, 6 aa, Artificial Sequence
  synthetic polypeptide
SISRGN

SEQ ID NO: 267 - protein, 10 aa, Artificial Sequence
  synthetic polypeptide
GFTFSSYSMN

SEQ ID NO: 268 - protein, 5 aa, Artificial Sequence
  synthetic polypeptide
NYAMS

SEQ ID NO: 269 - protein, 17 aa, Artificial Sequence
  synthetic polypeptide
AIRGGGGSTYYADSVKG

SEQ ID NO: 270 - protein, 11 aa, Artificial Sequence
  synthetic polypeptide
DFISGTWYPDY

SEQ ID NO: 271 - protein, 7 aa, Artificial Sequence
  synthetic polypeptide
GFAFSNY

SEQ ID NO: 272 - protein, 6 aa, Artificial Sequence
  synthetic polypeptide
RGGGGS

SEQ ID NO: 273 - protein, 10 aa, Artificial Sequence
  synthetic polypeptide
GFAFSNYAMS

SEQ ID NO: 274 - protein, 5 aa, Artificial Sequence
  synthetic polypeptide
SYWIG

SEQ ID NO: 275 - protein, 17 aa, Artificial Sequence
  synthetic polypeptide
SIYPDDSDTRYSPSFQG

SEQ ID NO: 276 - protein, 13 aa, Artificial Sequence
  synthetic polypeptide
STVDYPGYSYFDY

SEQ ID NO: 277 - protein, 7 aa, Artificial Sequence
  synthetic polypeptide
GYRFTSY

SEQ ID NO: 278 - protein, 6 aa, Artificial Sequence
  synthetic polypeptide
YPDDSD

SEQ ID NO: 279 - protein, 10 aa, Artificial Sequence
  synthetic polypeptide
GYRFTSYWIG

SEQ ID NO: 280 - protein, 5 aa, Artificial Sequence
  synthetic polypeptide
NYWIA

SEQ ID NO: 281 - protein, 17 aa, Artificial Sequence
  synthetic polypeptide
IIYPDGSDTRYSPSFQG

SEQ ID NO: 282 - protein, 14 aa, Artificial Sequence
  synthetic polypeptide
DITSWYYGEPAFDI

SEQ ID NO: 283 - protein, 7 aa, Artificial Sequence
  synthetic polypeptide
GYTFTNY

SEQ ID NO: 284 - protein, 6 aa, Artificial Sequence
  synthetic polypeptide
YPDGSD

SEQ ID NO: 285 - protein, 10 aa, Artificial Sequence
  synthetic polypeptide
GYTFTNYWIA

SEQ ID NO: 286 - protein, 5 aa, Artificial Sequence
  synthetic polypeptide
SSWIG

SEQ ID NO: 287 - protein, 17 aa, Artificial Sequence
  synthetic polypeptide
IIYPGDSDTRYSPSFQG

SEQ ID NO: 288 - protein, 13 aa, Artificial Sequence
  synthetic polypeptide
GLSQAMTGFGFDY

SEQ ID NO: 289 - protein, 7 aa, Artificial Sequence
  synthetic polypeptide
GYSFTSS

SEQ ID NO: 290 - protein, 6 aa, Artificial Sequence
  synthetic polypeptide
YPGDSD

SEQ ID NO: 291 - protein, 10 aa, Artificial Sequence
  synthetic polypeptide
GYSFTSSWIG

SEQ ID NO: 292 - protein, 5 aa, Artificial Sequence
  synthetic polypeptide
SYWIG

SEQ ID NO: 293 - protein, 17 aa, Artificial Sequence
  synthetic polypeptide
IIHPDDSDTKYSPSFQG

SEQ ID NO: 294 - protein, 13 aa, Artificial Sequence
  synthetic polypeptide
SYLRGLWGGYFDY

SEQ ID NO: 295 - protein, 7 aa, Artificial Sequence
  synthetic polypeptide
GYGFTSY

SEQ ID NO: 296 - protein, 6 aa, Artificial Sequence
  synthetic polypeptide
HPDDSD

SEQ ID NO: 297 - protein, 10 aa, Artificial Sequence
  synthetic polypeptide
GYGFTSYWIG

SEQ ID NO: 298 - protein, 5 aa, Artificial Sequence
  synthetic polypeptide
SSWIG

SEQ ID NO: 299 - protein, 16 aa, Artificial Sequence
  synthetic polypeptide
IIYPDTSHTRYSPSFQ

SEQ ID NO: 300 - protein, 17 aa, Artificial Sequence
  synthetic polypeptide
ASYFDRGTGYSSWWMDV

SEQ ID NO: 301 - protein, 7 aa, Artificial Sequence
  synthetic polypeptide
GYTFPSS

SEQ ID NO: 302 - protein, 6 aa, Artificial Sequence
  synthetic polypeptide
YPDTSH

SEQ ID NO: 303 - protein, 10 aa, Artificial Sequence
  synthetic polypeptide
GYTFPSSWIG

SEQ ID NO: 304 - protein, 5 aa, Artificial Sequence
  synthetic polypeptide
QYSMS

SEQ ID NO: 305 - protein, 17 aa, Artificial Sequence
  synthetic polypeptide
AISGGGVSTYYADSVKG

SEQ ID NO: 306 - protein, 14 aa, Artificial Sequence
  synthetic polypeptide
DISDSGGSHWYFDY

SEQ ID NO: 307 - protein, 7 aa, Artificial Sequence
  synthetic polypeptide
GFTFSQY

SEQ ID NO: 308 - protein, 6 aa, Artificial Sequence
  synthetic polypeptide
SGGGVS

SEQ ID NO: 309 - protein, 10 aa, Artificial Sequence
  synthetic polypeptide
GFTFSQYSMS

SEQ ID NO: 310 - protein, 5 aa, Artificial Sequence
  synthetic polypeptide
SYAMS

SEQ ID NO: 311 - protein, 17 aa, Artificial Sequence
  synthetic polypeptide
TISGTGGTTYYADSVKG

SEQ ID NO: 312 - protein, 12 aa, Artificial Sequence
  synthetic polypeptide
VRAGIDPTASDV

SEQ ID NO: 313 - protein, 7 aa, Artificial Sequence
  synthetic polypeptide
GFTFSSY

SEQ ID NO: 314 - protein, 6 aa, Artificial Sequence
  synthetic polypeptide
SGTGGT

SEQ ID NO: 315 - protein, 10 aa, Artificial Sequence
  synthetic polypeptide
GFTFSSYAMS

SEQ ID NO: 316 - protein, 5 aa, Artificial Sequence
  synthetic polypeptide
NFAMS

SEQ ID NO: 317 - protein, 17 aa, Artificial Sequence
  synthetic polypeptide
GISGSGDNTYYADSVKG

SEQ ID NO: 318 - protein, 15 aa, Artificial Sequence
  synthetic polypeptide
DRDIGLGWYSYYLDV

SEQ ID NO: 319 - protein, 7 aa, Artificial Sequence
  synthetic polypeptide
GFTFNNF

SEQ ID NO: 320 - protein, 6 aa, Artificial Sequence
  synthetic polypeptide
SGSGDN

SEQ ID NO: 321 - protein, 10 aa, Artificial Sequence
  synthetic polypeptide
GFTFNNFAMS

SEQ ID NO: 322 - protein, 5 aa, Artificial Sequence
  synthetic polypeptide
SYAIS

SEQ ID NO: 323 - protein, 17 aa, Artificial Sequence
  synthetic polypeptide
EIIPIFGTASYAQKFQG

SEQ ID NO: 324 - protein, 10 aa, Artificial Sequence
  synthetic polypeptide
AGWDDSWFDY

SEQ ID NO: 325 - protein, 7 aa, Artificial Sequence
  synthetic polypeptide
GGTFSSY

SEQ ID NO: 326 - protein, 6 aa, Artificial Sequence
  synthetic polypeptide
IPIFGT

SEQ ID NO: 327 - protein, 10 aa, Artificial Sequence
  synthetic polypeptide
GGTFSSYAIS

SEQ ID NO: 328 - protein, 5 aa, Artificial Sequence
  synthetic polypeptide
SYWIG

SEQ ID NO: 329 - protein, 17 aa, Artificial Sequence
  synthetic polypeptide
VIYPGTSETRYSPSFQG

SEQ ID NO: 330 - protein, 13 aa, Artificial Sequence
  synthetic polypeptide
GLSASASGYSFQY

SEQ ID NO: 331 - protein, 7 aa, Artificial Sequence
  synthetic polypeptide
GYSFASY

SEQ ID NO: 332 - protein, 6 aa, Artificial Sequence
  synthetic polypeptide
YPGTSE

SEQ ID NO: 333 - protein, 10 aa, Artificial Sequence
  synthetic polypeptide
GYSFASYWIG

SEQ ID NO: 334 - protein, 5 aa, Artificial Sequence
  synthetic polypeptide
DYWIG

SEQ ID NO: 335 - protein, 17 aa, Artificial Sequence
  synthetic polypeptide
MISPGGSTTIYRPSFQG

SEQ ID NO: 336 - protein, 14 aa, Artificial Sequence
  synthetic polypeptide
MYTGGYGGSWYFDY

SEQ ID NO: 337 - protein, 7 aa, Artificial Sequence
  synthetic polypeptide
GYSFTDY

SEQ ID NO: 338 - protein, 6 aa, Artificial Sequence
  synthetic polypeptide
SPGGST

SEQ ID NO: 339 - protein, 10 aa, Artificial Sequence
  synthetic polypeptide
GYSFTDYWIG

SEQ ID NO: 340 - protein, 5 aa, Artificial Sequence
  synthetic polypeptide
YYYWT

SEQ ID NO: 341 - protein, 16 aa, Artificial Sequence
  synthetic polypeptide
HIYYSGSTNYNPSLKS

SEQ ID NO: 342 - protein, 10 aa, Artificial Sequence
  synthetic polypeptide
AEGSLDAFDF

SEQ ID NO: 343 - protein, 7 aa, Artificial Sequence
  synthetic polypeptide
GGSISYY

SEQ ID NO: 344 - protein, 5 aa, Artificial Sequence
  synthetic polypeptide
YYSGS

SEQ ID NO: 345 - protein, 10 aa, Artificial Sequence
  synthetic polypeptide
GGSISYYYWT

SEQ ID NO: 346 - protein, 5 aa, Artificial Sequence
  synthetic polypeptide
SNYMT

SEQ ID NO: 347 - protein, 16 aa, Artificial Sequence
  synthetic polypeptide
VIYSGGSTYYADSVKG

SEQ ID NO: 348 - protein, 6 aa, Artificial Sequence
  synthetic polypeptide
NWGDYW

SEQ ID NO: 349 - protein, 7 aa, Artificial Sequence
  synthetic polypeptide
GFTVSSN

SEQ ID NO: 350 - protein, 5 aa, Artificial Sequence
  synthetic polypeptide
YSGGS

SEQ ID NO: 351 - protein, 10 aa, Artificial Sequence
  synthetic polypeptide
GFTVSSNYMT

SEQ ID NO: 352 - protein, 5 aa, Artificial Sequence
  synthetic polypeptide
YYFWN

SEQ ID NO: 353 - protein, 16 aa, Artificial Sequence
  synthetic polypeptide
HVYDIGNTKYNPSLKS

SEQ ID NO: 354 - protein, 10 aa, Artificial Sequence
  synthetic polypeptide
GEGALDAFDI

SEQ ID NO: 355 - protein, 7 aa, Artificial Sequence
  synthetic polypeptide
GGSIDYY

SEQ ID NO: 356 - protein, 5 aa, Artificial Sequence
  synthetic polypeptide
YDIGN

SEQ ID NO: 357 - protein, 10 aa, Artificial Sequence
  synthetic polypeptide
GGSIDYYFWN

SEQ ID NO: 358 - protein, 5 aa, Artificial Sequence
  synthetic polypeptide
YYYWT

SEQ ID NO: 359 - protein, 16 aa, Artificial Sequence
  synthetic polypeptide
HVIYSGTTNYNPSLKS

SEQ ID NO: 360 - protein, 10 aa, Artificial Sequence
  synthetic polypeptide
AEGSLDAFDL

SEQ ID NO: 361 - protein, 7 aa, Artificial Sequence
  synthetic polypeptide
GGSISYY

SEQ ID NO: 362 - protein, 5 aa, Artificial Sequence
  synthetic polypeptide
IYSGT

SEQ ID NO: 363 - protein, 10 aa, Artificial Sequence
  synthetic polypeptide
GGSISYYYWT

SEQ ID NO: 364 - protein, 5 aa, Artificial Sequence
  synthetic polypeptide
DYGIH

SEQ ID NO: 365 - protein, 17 aa, Artificial Sequence
  synthetic polypeptide
VIWYDGSIKKYSDSVKG

SEQ ID NO: 366 - protein, 11 aa, Artificial Sequence
  synthetic polypeptide
DEVGTFGAFDF

SEQ ID NO: 367 - protein, 7 aa, Artificial Sequence
  synthetic polypeptide
GFTFSDY

SEQ ID NO: 368 - protein, 6 aa, Artificial Sequence
  synthetic polypeptide
WYDGSI

SEQ ID NO: 369 - protein, 10 aa, Artificial Sequence
  synthetic polypeptide
GFTFSDYGIH

SEQ ID NO: 370 - protein, 7 aa, Artificial Sequence
  synthetic polypeptide
SDGYYWS

SEQ ID NO: 371 - protein, 16 aa, Artificial Sequence
  synthetic polypeptide
YMYYSGSTYYNPSLKS

SEQ ID NO: 372 - protein, 8 aa, Artificial Sequence
  synthetic polypeptide
DFGWYFDL

SEQ ID NO: 373 - protein, 9 aa, Artificial Sequence
  synthetic polypeptide
GGSISSDGY

SEQ ID NO: 374 - protein, 5 aa, Artificial Sequence
  synthetic polypeptide
YYSGS

SEQ ID NO: 375 - protein, 12 aa, Artificial Sequence
  synthetic polypeptide
GGSISSDGYYWS

SEQ ID NO: 376 - protein, 7 aa, Artificial Sequence
  synthetic polypeptide
SDGYYWS

SEQ ID NO: 377 - protein, 16 aa, Artificial Sequence
  synthetic polypeptide
YIYYRRITDYNPSLKS

SEQ ID NO: 378 - protein, 8 aa, Artificial Sequence
  synthetic polypeptide
DFGWYFDL

SEQ ID NO: 379 - protein, 9 aa, Artificial Sequence
  synthetic polypeptide
GGSVSSDGY

SEQ ID NO: 380 - protein, 5 aa, Artificial Sequence
  synthetic polypeptide
YYRRI

SEQ ID NO: 381 - protein, 12 aa, Artificial Sequence
  synthetic polypeptide
GGSVSSDGYYWS

SEQ ID NO: 382 - protein, 5 aa, Artificial Sequence
  synthetic polypeptide
GYYLH

SEQ ID NO: 383 - protein, 17 aa, Artificial Sequence
  synthetic polypeptide
WINPNSGGTNYAQKFQG

SEQ ID NO: 384 - protein, 13 aa, Artificial Sequence
  synthetic polypeptide
DRGVTMIVDGMDD

SEQ ID NO: 385 - protein, 7 aa, Artificial Sequence
  synthetic polypeptide
GYTFTGY

SEQ ID NO: 386 - protein, 6 aa, Artificial Sequence
  synthetic polypeptide
NPNSGG

SEQ ID NO: 387 - protein, 10 aa, Artificial Sequence
  synthetic polypeptide
GYTFTGYYLH

SEQ ID NO: 388 - protein, 5 aa, Artificial Sequence
  synthetic polypeptide
DYGMH

SEQ ID NO: 389 - protein, 17 aa, Artificial Sequence
  synthetic polypeptide
VIWYDGSNKYYADSVKG

SEQ ID NO: 390 - protein, 11 aa, Artificial Sequence
  synthetic polypeptide
DEVGFVGAFDI

SEQ ID NO: 391 - protein, 7 aa, Artificial Sequence
  synthetic polypeptide
GFTFSDY

SEQ ID NO: 392 - protein, 6 aa, Artificial Sequence
  synthetic polypeptide
WYDGSN

SEQ ID NO: 393 - protein, 10 aa, Artificial Sequence
  synthetic polypeptide
GFTFSDYGMH

SEQ ID NO: 394 - protein, 7 aa, Artificial Sequence
  synthetic polypeptide
SDGYYWS

SEQ ID NO: 395 - protein, 16 aa, Artificial Sequence
  synthetic polypeptide
YMYYSGITYHNPSLKS

SEQ ID NO: 396 - protein, 8 aa, Artificial Sequence
  synthetic polypeptide
DFGWYFDL

SEQ ID NO: 397 - protein, 9 aa, Artificial Sequence
  synthetic polypeptide
GGSISSDGY

SEQ ID NO: 398 - protein, 5 aa, Artificial Sequence
  synthetic polypeptide
YYSGI

SEQ ID NO: 399 - protein, 12 aa, Artificial Sequence
  synthetic polypeptide
GGSISSDGYYWS

SEQ ID NO: 400 - protein, 7 aa, Artificial Sequence
  synthetic polypeptide
SDAYYWS

SEQ ID NO: 401 - protein, 16 aa, Artificial Sequence
  synthetic polypeptide
YMYYSGITYYNPSLKS

SEQ ID NO: 402 - protein, 8 aa, Artificial Sequence
  synthetic polypeptide
DFGWYFDL

SEQ ID NO: 403 - protein, 9 aa, Artificial Sequence
  synthetic polypeptide
GGSISSDAY

SEQ ID NO: 404 - protein, 5 aa, Artificial Sequence
  synthetic polypeptide
YYSGI

SEQ ID NO: 405 - protein, 12 aa, Artificial Sequence
  synthetic polypeptide
GGSISSDAYYWS

SEQ ID NO: 406 - protein, 5 aa, Artificial Sequence
  synthetic polypeptide
DYGIH

SEQ ID NO: 407 - protein, 17 aa, Artificial Sequence
  synthetic polypeptide
VIWYDGSIKKYSDSVKG

SEQ ID NO: 408 - protein, 11 aa, Artificial Sequence
  synthetic polypeptide
DEVGTFGAFDF

SEQ ID NO: 409 - protein, 7 aa, Artificial Sequence
  synthetic polypeptide
GFTFSDY

SEQ ID NO: 410 - protein, 6 aa, Artificial Sequence
  synthetic polypeptide
WYDGSI

SEQ ID NO: 411 - protein, 10 aa, Artificial Sequence
  synthetic polypeptide
GFTFSDYGIH

SEQ ID NO: 412 - protein, 5 aa, Artificial Sequence
  synthetic polypeptide
NAWMS

SEQ ID NO: 413 - protein, 19 aa, Artificial Sequence
  synthetic polypeptide
RIKSKTGGGTTDYAAPVKG

SEQ ID NO: 414 - protein, 11 aa, Artificial Sequence
  synthetic polypeptide
LIVGAISLFDY

SEQ ID NO: 415 - protein, 7 aa, Artificial Sequence
  synthetic polypeptide
GFTFSNA

SEQ ID NO: 416 - protein, 8 aa, Artificial Sequence
  synthetic polypeptide
KSKTGGGT

SEQ ID NO: 417 - protein, 10 aa, Artificial Sequence
  synthetic polypeptide
GFTFSNAWMS

SEQ ID NO: 418 - protein, 5 aa, Artificial Sequence
  synthetic polypeptide
YYFWT

SEQ ID NO: 419 - protein, 16 aa, Artificial Sequence
  synthetic polypeptide
QIYYSGNTNSNPSLKS

SEQ ID NO: 420 - protein, 10 aa, Artificial Sequence
  synthetic polypeptide
AEGSLDAFDI

SEQ ID NO: 421 - protein, 7 aa, Artificial Sequence
  synthetic polypeptide
GGSISYY

SEQ ID NO: 422 - protein, 5 aa, Artificial Sequence
  synthetic polypeptide
YYSGN

SEQ ID NO: 423 - protein, 10 aa, Artificial Sequence
  synthetic polypeptide
GGSISYYFWT

SEQ ID NO: 424 - protein, 5 aa, Artificial Sequence
  synthetic polypeptide
SYSMN

SEQ ID NO: 425 - protein, 17 aa, Artificial Sequence
  synthetic polypeptide
SISTSSNYIHYADSLQG

SEQ ID NO: 426 - protein, 13 aa, Artificial Sequence
  synthetic polypeptide
DKGTTLTNWYFDL

SEQ ID NO: 427 - protein, 7 aa, Artificial Sequence
  synthetic polypeptide
GFTFSSY

SEQ ID NO: 428 - protein, 6 aa, Artificial Sequence
  synthetic polypeptide
STSSNY

SEQ ID NO: 429 - protein, 10 aa, Artificial Sequence
  synthetic polypeptide
GFTFSSYSMN

SEQ ID NO: 430 - protein, 5 aa, Artificial Sequence
  synthetic polypeptide
SYGMH

SEQ ID NO: 431 - protein, 17 aa, Artificial Sequence
  synthetic polypeptide
VIWYDGSNKYYADSLKG

SEQ ID NO: 432 - protein, 12 aa, Artificial Sequence
  synthetic polypeptide
DGYSGSSDAFDI

SEQ ID NO: 433 - protein, 7 aa, Artificial Sequence
  synthetic polypeptide
GFTFSSY

SEQ ID NO: 434 - protein, 6 aa, Artificial Sequence
  synthetic polypeptide
WYDGSN

SEQ ID NO: 435 - protein, 10 aa, Artificial Sequence
  synthetic polypeptide
GFTFSSYGMH

SEQ ID NO: 436 - protein, 5 aa, Artificial Sequence
  synthetic polypeptide
YYYWS

SEQ ID NO: 437 - protein, 16 aa, Artificial Sequence
  synthetic polypeptide
NINYMGNTIYNPSLKS

SEQ ID NO: 438 - protein, 10 aa, Artificial Sequence
  synthetic polypeptide
AEGSLDAFDF

SEQ ID NO: 439 - protein, 7 aa, Artificial Sequence
  synthetic polypeptide
GGSISYY

SEQ ID NO: 440 - protein, 5 aa, Artificial Sequence
  synthetic polypeptide
NYMGN

SEQ ID NO: 441 - protein, 10 aa, Artificial Sequence
  synthetic polypeptide
GGSISYYYWS

SEQ ID NO: 442 - protein, 5 aa, Artificial Sequence
  synthetic polypeptide
GYYIY

SEQ ID NO: 443 - protein, 17 aa, Artificial Sequence
  synthetic polypeptide
WINPSSGGTNYAQKFQG

SEQ ID NO: 444 - protein, 14 aa, Artificial Sequence
  synthetic polypeptide
DRKREYYYNFGMDV

SEQ ID NO: 445 - protein, 7 aa, Artificial Sequence
  synthetic polypeptide
GYIFTGY

SEQ ID NO: 446 - protein, 6 aa, Artificial Sequence
  synthetic polypeptide
NPSSGG

SEQ ID NO: 447 - protein, 10 aa, Artificial Sequence
  synthetic polypeptide
GYIFTGYYIY

SEQ ID NO: 448 - protein, 5 aa, Artificial Sequence
  synthetic polypeptide
SHYIY

SEQ ID NO: 449 - protein, 17 aa, Artificial Sequence
  synthetic polypeptide
WINPNSGGTNYAQKFQD

SEQ ID NO: 450 - protein, 14 aa, Artificial Sequence
  synthetic polypeptide
DRKREYYYNFGMDV

SEQ ID NO: 451 - protein, 7 aa, Artificial Sequence
  synthetic polypeptide
GYTFTSH

SEQ ID NO: 452 - protein, 6 aa, Artificial Sequence
  synthetic polypeptide
NPNSGG

SEQ ID NO: 453 - protein, 10 aa, Artificial Sequence
  synthetic polypeptide
GYTFTSHYIY

SEQ ID NO: 454 - protein, 5 aa, Artificial Sequence
  synthetic polypeptide
SHYIY

SEQ ID NO: 455 - protein, 17 aa, Artificial Sequence
  synthetic polypeptide
WINPNSGGTKYAQKFQD

SEQ ID NO: 456 - protein, 14 aa, Artificial Sequence
  synthetic polypeptide
DRKREYYYNFGMDV

SEQ ID NO: 457 - protein, 7 aa, Artificial Sequence
  synthetic polypeptide
GFTFTSH

SEQ ID NO: 458 - protein, 6 aa, Artificial Sequence
  synthetic polypeptide
NPNSGG

SEQ ID NO: 459 - protein, 10 aa, Artificial Sequence
  synthetic polypeptide
GFTFTSHYIY

SEQ ID NO: 460 - protein, 5 aa, Artificial Sequence
  synthetic polypeptide
IYAIH

SEQ ID NO: 461 - protein, 17 aa, Artificial Sequence
  synthetic polypeptide
SFGGRGSSTYFADSVKG

SEQ ID NO: 462 - protein, 10 aa, Artificial Sequence
  synthetic polypeptide
EKDWGRGFDY

SEQ ID NO: 463 - protein, 7 aa, Artificial Sequence
  synthetic polypeptide
GFTLSIY

SEQ ID NO: 464 - protein, 6 aa, Artificial Sequence
  synthetic polypeptide
GGRGSS

SEQ ID NO: 465 - protein, 10 aa, Artificial Sequence
  synthetic polypeptide
GFTLSIYAIH

SEQ ID NO: 466 - protein, 5 aa, Artificial Sequence
  synthetic polypeptide
NYSMN

SEQ ID NO: 467 - protein, 17 aa, Artificial Sequence
  synthetic polypeptide
SISSSTIYIYYADSVKG

SEQ ID NO: 468 - protein, 13 aa, Artificial Sequence
  synthetic polypeptide
DIGWEVFTLGFDY

SEQ ID NO: 469 - protein, 7 aa, Artificial Sequence
  synthetic polypeptide
GFTFSNY

SEQ ID NO: 470 - protein, 6 aa, Artificial Sequence
  synthetic polypeptide
SSSTIY

SEQ ID NO: 471 - protein, 10 aa, Artificial Sequence
  synthetic polypeptide
GFTFSNYSMN

SEQ ID NO: 472 - protein, 5 aa, Artificial Sequence
  synthetic polypeptide
DYGMH

SEQ ID NO: 473 - protein, 17 aa, Artificial Sequence
  synthetic polypeptide
VIWYDGSNKYYADSVKG

SEQ ID NO: 474 - protein, 11 aa, Artificial Sequence
  synthetic polypeptide
DEVGFVGAFDI

SEQ ID NO: 475 - protein, 7 aa, Artificial Sequence
  synthetic polypeptide
GFTFSDY

SEQ ID NO: 476 - protein, 6 aa, Artificial Sequence
  synthetic polypeptide
WYDGSN

SEQ ID NO: 477 - protein, 10 aa, Artificial Sequence
  synthetic polypeptide
GFTFSDYGMH

SEQ ID NO: 478 - protein, 16 aa, Artificial Sequence
  synthetic polypeptide
RSSQSLVHSDGNTYLS

SEQ ID NO: 479 - protein, 7 aa, Artificial Sequence
  synthetic polypeptide
KISNRFS

SEQ ID NO: 480 - protein, 9 aa, Artificial Sequence
  synthetic polypeptide
MQATQFPLT

SEQ ID NO: 481 - protein, 16 aa, Artificial Sequence
  synthetic polypeptide
RSSQSLVHSDGNTYLS

SEQ ID NO: 482 - protein, 7 aa, Artificial Sequence
  synthetic polypeptide
KISNRFS

SEQ ID NO: 483 - protein, 9 aa, Artificial Sequence
  synthetic polypeptide
MQATQFPLT

SEQ ID NO: 484 - protein, 11 aa, Artificial Sequence
  synthetic polypeptide
RASQGISNYLA

SEQ ID NO: 485 - protein, 7 aa, Artificial Sequence
  synthetic polypeptide
AASSLQS

SEQ ID NO: 486 - protein, 9 aa, Artificial Sequence
  synthetic polypeptide
QQYNSYPLT

SEQ ID NO: 487 - protein, 16 aa, Artificial Sequence
  synthetic polypeptide
RSSQSLVYSDENTYLN

SEQ ID NO: 488 - protein, 7 aa, Artificial Sequence
  synthetic polypeptide
QVSNRDS

SEQ ID NO: 489 - protein, 9 aa, Artificial Sequence
  synthetic polypeptide
MQGTYWPPT

SEQ ID NO: 490 - protein, 11 aa, Artificial Sequence
  synthetic polypeptide
RASQSVSSSLA

SEQ ID NO: 491 - protein, 7 aa, Artificial Sequence
  synthetic polypeptide
GASTRAT

SEQ ID NO: 492 - protein, 8 aa, Artificial Sequence
  synthetic polypeptide
QQYINWPH

SEQ ID NO: 493 - protein, 11 aa, Artificial Sequence
  synthetic polypeptide
QASQDISNYLN

SEQ ID NO: 494 - protein, 7 aa, Artificial Sequence
  synthetic polypeptide
GASNLET

SEQ ID NO: 495 - protein, 9 aa, Artificial Sequence
  synthetic polypeptide
QQYDNFPIT

SEQ ID NO: 496 - protein, 11 aa, Artificial Sequence
  synthetic polypeptide
RASQSVSSNLA

SEQ ID NO: 497 - protein, 7 aa, Artificial Sequence
  synthetic polypeptide
SASTRAS

SEQ ID NO: 498 - protein, 10 aa, Artificial Sequence
  synthetic polypeptide
QQYDNWPPLT

SEQ ID NO: 499 - protein, 12 aa, Artificial Sequence
  synthetic polypeptide
RASQSVSSSYLA

SEQ ID NO: 500 - protein, 7 aa, Artificial Sequence
  synthetic polypeptide
GASSRAT

SEQ ID NO: 501 - protein, 9 aa, Artificial Sequence
  synthetic polypeptide
QQYGSSPLT

SEQ ID NO: 502 - protein, 11 aa, Artificial Sequence
  synthetic polypeptide
RASQDISNYLA

SEQ ID NO: 503 - protein, 7 aa, Artificial Sequence
  synthetic polypeptide
AASSLQS

SEQ ID NO: 504 - protein, 9 aa, Artificial Sequence
  synthetic polypeptide
LQLNSFPFT

SEQ ID NO: 505 - protein, 11 aa, Artificial Sequence
  synthetic polypeptide
RASQGISSWLA

SEQ ID NO: 506 - protein, 7 aa, Artificial Sequence
  synthetic polypeptide
AASSLQS

SEQ ID NO: 507 - protein, 9 aa, Artificial Sequence
  synthetic polypeptide
QQAFSFPFT

SEQ ID NO: 508 - protein, 17 aa, Artificial Sequence
  synthetic polypeptide
KSSQSVLYSYNNKNYVA

SEQ ID NO: 509 - protein, 7 aa, Artificial Sequence
  synthetic polypeptide
WASTRES

SEQ ID NO: 510 - protein, 8 aa, Artificial Sequence
  synthetic polypeptide
QQYYSTLT

SEQ ID NO: 511 - protein, 12 aa, Artificial Sequence
  synthetic polypeptide
RASQSVSSSYLA

SEQ ID NO: 512 - protein, 7 aa, Artificial Sequence
  synthetic polypeptide
DASSRAT

SEQ ID NO: 513 - protein, 9 aa, Artificial Sequence
  synthetic polypeptide
QQYGSSPLT

SEQ ID NO: 514 - protein, 13 aa, Artificial Sequence
  synthetic polypeptide
SGSSSNIGSNYVY

SEQ ID NO: 515 - protein, 7 aa, Artificial Sequence
  synthetic polypeptide
RNNQRPS

SEQ ID NO: 516 - protein, 11 aa, Artificial Sequence
  synthetic polypeptide
AAWDDSLSGVV

SEQ ID NO: 517 - protein, 13 aa, Artificial Sequence
  synthetic polypeptide
SGSRSNIGSNYVY

SEQ ID NO: 518 - protein, 7 aa, Artificial Sequence
  synthetic polypeptide
RNNQRPS

SEQ ID NO: 519 - protein, 11 aa, Artificial Sequence
  synthetic polypeptide
ASWDGSLSAVV

SEQ ID NO: 520 - protein, 13 aa, Artificial Sequence
  synthetic polypeptide
SGSSSNIGSNYVY

SEQ ID NO: 521 - protein, 7 aa, Artificial Sequence
  synthetic polypeptide
RNNQRPS

SEQ ID NO: 522 - protein, 11 aa, Artificial Sequence
  synthetic polypeptide
ATWDDSLGSPV

SEQ ID NO: 523 - protein, 11 aa, Artificial Sequence
  synthetic polypeptide
RASQSISRYLN

SEQ ID NO: 524 - protein, 7 aa, Artificial Sequence
  synthetic polypeptide
AASILQT

SEQ ID NO: 525 - protein, 10 aa, Artificial Sequence
  synthetic polypeptide
QQSYSTTMWT

SEQ ID NO: 526 - protein, 13 aa, Artificial Sequence
  synthetic polypeptide
SGSSSNIGSNYVN

SEQ ID NO: 527 - protein, 7 aa, Artificial Sequence
  synthetic polypeptide
GDYQRPS

SEQ ID NO: 528 - protein, 12 aa, Artificial Sequence
  synthetic polypeptide
ATRDDSLSGSVV

SEQ ID NO: 529 - protein, 11 aa, Artificial Sequence
  synthetic polypeptide
RASQSIYDYLH

SEQ ID NO: 530 - protein, 7 aa, Artificial Sequence
  synthetic polypeptide
DASNLQS

SEQ ID NO: 531 - protein, 10 aa, Artificial Sequence
  synthetic polypeptide
QQSYTTPLFT

SEQ ID NO: 532 - protein, 11 aa, Artificial Sequence
  synthetic polypeptide
RASQYIGRYLN

SEQ ID NO: 533 - protein, 7 aa, Artificial Sequence
  synthetic polypeptide
GATSLAS

SEQ ID NO: 534 - protein, 10 aa, Artificial Sequence
  synthetic polypeptide
QQSYSTTSPT

SEQ ID NO: 535 - protein, 13 aa, Artificial Sequence
  synthetic polypeptide
SGSTSNIGRNYVY

SEQ ID NO: 536 - protein, 7 aa, Artificial Sequence
  synthetic polypeptide
RTNQRPS

SEQ ID NO: 537 - protein, 11 aa, Artificial Sequence
  synthetic polypeptide
AAWDDSLSGRV

SEQ ID NO: 538 - protein, 13 aa, Artificial Sequence
  synthetic polypeptide
SGSSSNIGSNYVY

SEQ ID NO: 539 - protein, 7 aa, Artificial Sequence
  synthetic polypeptide
MNNQRPS

SEQ ID NO: 540 - protein, 11 aa, Artificial Sequence
  synthetic polypeptide
AAWDDSLSAVV

SEQ ID NO: 541 - protein, 13 aa, Artificial Sequence
  synthetic polypeptide
SGSNSNIGTNYVS

SEQ ID NO: 542 - protein, 7 aa, Artificial Sequence
  synthetic polypeptide
RSSRRPS

SEQ ID NO: 543 - protein, 12 aa, Artificial Sequence
  synthetic polypeptide
AAWDGSLSGHWV

SEQ ID NO: 544 - protein, 11 aa, Artificial Sequence
  synthetic polypeptide
RASQSIDTYLN

SEQ ID NO: 545 - protein, 7 aa, Artificial Sequence
  synthetic polypeptide
SASSLHS

SEQ ID NO: 546 - protein, 10 aa, Artificial Sequence
  synthetic polypeptide
QQSYSTTAWT

SEQ ID NO: 547 - protein, 11 aa, Artificial Sequence
  synthetic polypeptide
RASQSIGQSLN

SEQ ID NO: 548 - protein, 7 aa, Artificial Sequence
  synthetic polypeptide
GASSLQS

SEQ ID NO: 549 - protein, 9 aa, Artificial Sequence
  synthetic polypeptide
QQSYSTPIT

SEQ ID NO: 550 - protein, 11 aa, Artificial Sequence
  synthetic polypeptide
RASQSISTWLA

SEQ ID NO: 551 - protein, 7 aa, Artificial Sequence
  synthetic polypeptide
KASSLES

SEQ ID NO: 552 - protein, 9 aa, Artificial Sequence
  synthetic polypeptide
QQYKSYSHT

SEQ ID NO: 553 - protein, 11 aa, Artificial Sequence
  synthetic polypeptide
RASQSISSWLA

SEQ ID NO: 554 - protein, 7 aa, Artificial Sequence
  synthetic polypeptide
KASSLES

SEQ ID NO: 555 - protein, 9 aa, Artificial Sequence
  synthetic polypeptide
QQYKSFSLT

SEQ ID NO: 556 - protein, 11 aa, Artificial Sequence
  synthetic polypeptide
RASQSISSWLA

SEQ ID NO: 557 - protein, 7 aa, Artificial Sequence
  synthetic polypeptide
KASTLES

SEQ ID NO: 558 - protein, 9 aa, Artificial Sequence
  synthetic polypeptide
QQYNSYSYT

SEQ ID NO: 559 - protein, 11 aa, Artificial Sequence
  synthetic polypeptide
RASQSVSSWLA

SEQ ID NO: 560 - protein, 7 aa, Artificial Sequence
  synthetic polypeptide
KASSLES

SEQ ID NO: 561 - protein, 9 aa, Artificial Sequence
  synthetic polypeptide
QQYNTYSHT

SEQ ID NO: 562 - protein, 11 aa, Artificial Sequence
  synthetic polypeptide
RASQGIRNDLG

SEQ ID NO: 563 - protein, 7 aa, Artificial Sequence
  synthetic polypeptide
AASSLQS

SEQ ID NO: 564 - protein, 9 aa, Artificial Sequence
  synthetic polypeptide
LQDYNYPFT

SEQ ID NO: 565 - protein, 11 aa, Artificial Sequence
  synthetic polypeptide
RASQDIDNYLA

SEQ ID NO: 566 - protein, 7 aa, Artificial Sequence
  synthetic polypeptide
AASALQS

SEQ ID NO: 567 - protein, 9 aa, Artificial Sequence
  synthetic polypeptide
QNYNSGPRT

SEQ ID NO: 568 - protein, 11 aa, Artificial Sequence
  synthetic polypeptide
RASQDISNYLT

SEQ ID NO: 569 - protein, 7 aa, Artificial Sequence
  synthetic polypeptide
AASALQS

SEQ ID NO: 570 - protein, 9 aa, Artificial Sequence
  synthetic polypeptide
QNYNSAPRT

SEQ ID NO: 571 - protein, 16 aa, Artificial Sequence
  synthetic polypeptide
RSSQSLLHSNGYNYLD

SEQ ID NO: 572 - protein, 7 aa, Artificial Sequence
  synthetic polypeptide
LGSNRAS

SEQ ID NO: 573 - protein, 9 aa, Artificial Sequence
  synthetic polypeptide
MQTLQTPFT

SEQ ID NO: 574 - protein, 11 aa, Artificial Sequence
  synthetic polypeptide
RASQGINSHLA

SEQ ID NO: 575 - protein, 7 aa, Artificial Sequence
  synthetic polypeptide
YASTLPS

SEQ ID NO: 576 - protein, 9 aa, Artificial Sequence
  synthetic polypeptide
QQLNHYPIT

SEQ ID NO: 577 - protein, 11 aa, Artificial Sequence
  synthetic polypeptide
RASQGISNYLA

SEQ ID NO: 578 - protein, 7 aa, Artificial Sequence
  synthetic polypeptide
AASTLHS

SEQ ID NO: 579 - protein, 9 aa, Artificial Sequence
  synthetic polypeptide
QKYNSAPRT

SEQ ID NO: 580 - protein, 11 aa, Artificial Sequence
  synthetic polypeptide
RASQDISNYLA

SEQ ID NO: 581 - protein, 7 aa, Artificial Sequence
  synthetic polypeptide
AASTLHS

SEQ ID NO: 582 - protein, 9 aa, Artificial Sequence
  synthetic polypeptide
QKYNSAPRT

SEQ ID NO: 583 - protein, 11 aa, Artificial Sequence
  synthetic polypeptide
RASQDISSFLA

SEQ ID NO: 584 - protein, 7 aa, Artificial Sequence
  synthetic polypeptide
VASTLQS

SEQ ID NO: 585 - protein, 9 aa, Artificial Sequence
  synthetic polypeptide
QQLHVYPIT

SEQ ID NO: 586 - protein, 17 aa, Artificial Sequence
  synthetic polypeptide
RSSQSLLDSDDGNTYLD

SEQ ID NO: 587 - protein, 7 aa, Artificial Sequence
  synthetic polypeptide
TLSYRAS

SEQ ID NO: 588 - protein, 9 aa, Artificial Sequence
  synthetic polypeptide
MQRIEFPFT

SEQ ID NO: 589 - protein, 11 aa, Artificial Sequence
  synthetic polypeptide
RASQTISTWLA

SEQ ID NO: 590 - protein, 7 aa, Artificial Sequence
  synthetic polypeptide
KASNLES

SEQ ID NO: 591 - protein, 9 aa, Artificial Sequence
  synthetic polypeptide
QQYQTFSHT

SEQ ID NO: 592 - protein, 11 aa, Artificial Sequence
  synthetic polypeptide
RASQGISNYLA

SEQ ID NO: 593 - protein, 7 aa, Artificial Sequence
  synthetic polypeptide
AASTLQS

SEQ ID NO: 594 - protein, 9 aa, Artificial Sequence
  synthetic polypeptide
QKYNSAPLT

SEQ ID NO: 595 - protein, 16 aa, Artificial Sequence
  synthetic polypeptide
RSSQTLVHSNGYNYLN

SEQ ID NO: 596 - protein, 7 aa, Artificial Sequence
  synthetic polypeptide
LGSNRAS

SEQ ID NO: 597 - protein, 9 aa, Artificial Sequence
  synthetic polypeptide
MQAIQTPYT

SEQ ID NO: 598 - protein, 11 aa, Artificial Sequence
  synthetic polypeptide
RASQSISSWLA

SEQ ID NO: 599 - protein, 7 aa, Artificial Sequence
  synthetic polypeptide
KASNLES

SEQ ID NO: 600 - protein, 9 aa, Artificial Sequence
  synthetic polypeptide
QQYNSYSCT

SEQ ID NO: 601 - protein, 11 aa, Artificial Sequence
  synthetic polypeptide
QASQDINNYLH

SEQ ID NO: 602 - protein, 7 aa, Artificial Sequence
  synthetic polypeptide
DASDWET

SEQ ID NO: 603 - protein, 9 aa, Artificial Sequence
  synthetic polypeptide
QQYDHLPIT

SEQ ID NO: 604 - protein, 11 aa, Artificial Sequence
  synthetic polypeptide
QASQDISNYLH

SEQ ID NO: 605 - protein, 7 aa, Artificial Sequence
  synthetic polypeptide
DASDLET

SEQ ID NO: 606 - protein, 9 aa, Artificial Sequence
  synthetic polypeptide
QQYDHLPIT

SEQ ID NO: 607 - protein, 11 aa, Artificial Sequence
  synthetic polypeptide
QASQDISNYLH

SEQ ID NO: 608 - protein, 7 aa, Artificial Sequence
  synthetic polypeptide
DASDLET

SEQ ID NO: 609 - protein, 9 aa, Artificial Sequence
  synthetic polypeptide
QQYDHLPIT

SEQ ID NO: 610 - protein, 11 aa, Artificial Sequence
  synthetic polypeptide
QASQDISNYLN

SEQ ID NO: 611 - protein, 7 aa, Artificial Sequence
  synthetic polypeptide
DASNLET

SEQ ID NO: 612 - protein, 9 aa, Artificial Sequence
  synthetic polypeptide
QQYDNLPYT

SEQ ID NO: 613 - protein, 16 aa, Artificial Sequence
  synthetic polypeptide
RSSQSLLYSNGYNYLD

SEQ ID NO: 614 - protein, 7 aa, Artificial Sequence
  synthetic polypeptide
LNSNRAS

SEQ ID NO: 615 - protein, 9 aa, Artificial Sequence
  synthetic polypeptide
MQALQTPLT

SEQ ID NO: 616 - protein, 11 aa, Artificial Sequence
  synthetic polypeptide
RASQGINSHLA

SEQ ID NO: 617 - protein, 7 aa, Artificial Sequence
  synthetic polypeptide
YASTLPS

SEQ ID NO: 618 - protein, 9 aa, Artificial Sequence
  synthetic polypeptide
QQLNHYPIT

SEQ ID NO: 619 - protein, 45 aa, Artificial Sequence
  synthetic polypeptide
TTTPAPRPPTPAPTIASQPLSLRPEACRPAAGGAVHTRGLDFACD

SEQ ID NO: 620 - protein, 232 aa, Homo sapiens
EPKSCDKTHTCPPCPAPELLGGPSVFLFPPKPKDTLMISRTPEVTCVVVDVSHEDPEVKFNWYVDGVEVHNAKTKPREEQYNSTYRVVSVLTVLHQDWLNGKEYKCKVSNKALPAPIEKTISKAKGQPREPQVYTLPPSRDELTKNQVSLTCLVKGFYPSDIAVEWESNGQPENNYKTTPPVLDSDGSFFLYSKLTVDKSRWQQGNVFSCSVMHEALHNHYTQKSLSLSPGK

SEQ ID NO: 621 - protein, 16 aa, Homo sapiens
GLAVSTISSFFPPGYQ

SEQ ID NO: 622-623 - skipped (2 entries)

SEQ ID NO: 624 - protein, 21 aa, Artificial Sequence
  synthetic polypeptide
IYIWAPLAGTCGVLLLSLVIT

SEQ ID NO: 625 - protein, 27 aa, Homo sapiens
FWVLVVVGGVLACYSLLVTVAFIIFWV

SEQ ID NO: 626 - protein, 23 aa, Homo sapiens
VVRVLAIALAIRFTLNTLMWLAI

SEQ ID NO: 627 - protein, 21 aa, Homo sapiens
VSFCLVMVLLFAVDTGLYFSV

SEQ ID NO: 628 - protein, 41 aa, Homo sapiens
RSKRSRGGHSDYMNMTPRRPGPTRKHYQPYAPPRDFAAYRS

SEQ ID NO: 629 - protein, 42 aa, Homo sapiens
KRGRKKLLYIFKQPFMRPVQTTQEEDGCSCRFPEEEEGGCEL

SEQ ID NO: 630 - protein, 24 aa, Homo sapiens
LCARPRRSPAQEDGKVYINMPGRG

SEQ ID NO: 631 - protein, 52 aa, Homo sapiens
YFLGRLVPRGRGAAEAATRKQRITETESPYQELQGQRSDVYSDLNTQRPYYK

SEQ ID NO: 632 - protein, 120 aa, Homo sapiens
WRRKRKEKQSETSPKEFLTIYEDVKDLKTRRNHEQEQTFPGGGSTIYSMIQSQSSAPTSQEPAYTLYSLIQPSRKSGSRKRNHSPSFNSTIYEVIGKSQPKAQNPARLSRKELENFDVYS

SEQ ID NO: 633-634 - skipped (2 entries)

SEQ ID NO: 635 - protein, 112 aa, Artificial Sequence
  synthetic polypeptide
RVKFSRSADAPAYKQGQNQLYNELNLGRREEYDVLDKRRGRDPEMGGKPRRKNPQEGLYNELQKDKMAEAYSEIGMKGERRRGKGHDGLYQGLSTATKDTYDALHMQALPPR

SEQ ID NO: 636 - skipped

SEQ ID NO: 637 - protein, 501 aa, Artificial Sequence
  synthetic polypeptide
MALPVTALLLPLALLLHAARPQVQLVQSGAEVKKPGASVKVSCKASGYTFTNYGMNWVRQAPGQGLKWMGWINTYTGEPTYADAFKGRVTMTRDTSISTAYMELSRLRSDDTAVYYCARDYGDYGMDYWGQGTTVTVSSGGGGSGGGGSGGGGSGDIVMTQSPDSLAVSLGERATINCRASKSVSTSGYSFMHWYQQKPGQPPKLLIYLASNLESGVPDRFSGSGSGTDFTLTISSLQAEDVAVYYCQHSREVPWTFGQGTKVEIKFVPVFLPAKPTTTPAPRPPTPAPTIASQPLSLRPEACRPAAGGAVHTRGLDFACDFWVLVVVGGVLACYSLLVTVAFIIFWVRSKRSRLLHSDYMNMTPRRPGPTRKHYQPYAPPRDFAAYRSRVKFSRSADAPAYQQGQNQLYNELNLGRREEYDVLDKRRGRDPEMGGKPRRKNPQEGLYNELQKDKMAEAYSEIGMKGERRRGKGHDGLYQGLSTATKDTYDALHMQALPPR

SEQ ID NO: 638 - skipped

SEQ ID NO: 639 - protein, 487 aa, Artificial Sequence
  synthetic polypeptide
MALPVTALLLPLALLLHAARPQVQLVQSGAEVKKPGASVKVSCKASGYTFTNYGMNWVRQAPGQGLKWMGWINTYTGEPTYADAFKGRVTMTRDTSISTAYMELSRLRSDDTAVYYCARDYGDYGMDYWGQGTTVTVSSGGGGSGGGGSGGGGSGDIVMTQSPDSLAVSLGERATINCRASKSVSTSGYSFMHWYQQKPGQPPKLLIYLASNLESGVPDRFSGSGSGTDFTLTISSLQAEDVAVYYCQHSREVPWTFGQGTKVEIKFVPVFLPAKPTTTPAPRPPTPAPTIASQPLSLRPEACRPAAGGAVHTRGLDFACDPFFFCCFIAVAMGIRFIIMVAIWSAVFLNSLCARPRRSPAQEDGKVYINMPGRGRVKFSRSADAPAYQQGQNQLYNELNLGRREEYDVLDKRRGRDPEMGGKPRRKNPQEGLYNELQKDKMAEAYSEIGMKGERRRGKGHDGLYQGLSTATKDTYDALHMQALPPR

SEQ ID NO: 640 - skipped

SEQ ID NO: 641 - protein, 515 aa, Artificial Sequence
  synthetic polypeptide
MALPVTALLLPLALLLHAARPQVQLVQSGAEVKKPGASVKVSCKASGYTFTNYGMNWVRQAPGQGLKWMGWINTYTGEPTYADAFKGRVTMTRDTSISTAYMELSRLRSDDTAVYYCARDYGDYGMDYWGQGTTVTVSSGGGGSGGGGSGGGGSGDIVMTQSPDSLAVSLGERATINCRASKSVSTSGYSFMHWYQQKPGQPPKLLIYLASNLESGVPDRFSGSGSGTDFTLTISSLQAEDVAVYYCQHSREVPWTFGQGTKVEIKFVPVFLPAKPTTTPAPRPPTPAPTIASQPLSLRPEACRPAAGGAVHTRGLDFACDPFFFCCFIAVAMGIRFIIMVAIWSAVFLNSYFLGRLVPRGRGAAEAATRKQRITETESPYQELQGQRSDVYSDLNTQRPYYKRVKFSRSADAPAYQQGQNQLYNELNLGRREEYDVLDKRRGRDPEMGGKPRRKNPQEGLYNELQKDKMAEAYSEIGMKGERRRGKGHDGLYQGLSTATKDTYDALHMQALPPR

SEQ ID NO: 642 - skipped

SEQ ID NO: 643 - protein, 372 aa, Artificial Sequence
  synthetic polypeptide
MARPHPWWLCVLGTLVGLSATPAPKSCPERHYWAQGKLCCQMCEPGTFLVKDCDQHRKAAQCDPCIPGVSFSPDHHTRPHCESCRHCNSGLLVRNCTITANAECACRNGWQCRDKECTECDPLPNPSLTARSSQALSPHPQPTHLPYVSEMLEARTAGHMQTLADFRQLPARTLSTHWPPQRSLCSSDFIRILVIFSGMFLVFTLAGALFLHQRRKYRSNKGESPVEPAEPCHYSCPREEEGSTIPIQEDYRKPEPACSPRVKFSRSADAPAYQQGQNQLYNELNLGRREEYDVLDKRRGRDPEMGGKPRRKNPQEGLYNELQKDKMAEAYSEIGMKGERRRGKGHDGLYQGLSTATKDTYDALHMQALPPR

SEQ ID NO: 644 - skipped

SEQ ID NO: 645 - protein, 371 aa, Artificial Sequence
  synthetic polypeptide
MARPHPWWLCVLGTLVGLSATPAPKSCPERHYWAQGKLCCQMCEPGTFLVKDCDQHRKAAQCDPCIPGVSFSPDHHTRPHCESCRHCNSGLLVRNCTITANAECACRNGWQCRDKECTECDPLPNPSLTARSSQALSPHPQPTHLPYVSEMLEARTAGHMQTLADFRQLPARTLSTHWPPQRSLCSSDFIRFWVLVVVGGVLACYSLLVTVAFIIFWVRSKRSRLLHSDYMNMTPRRPGPTRKHYQPYAPPRDFAAYRSRVKFSRSADAPAYQQGQNQLYNELNLGRREEYDVLDKRRGRDPEMGGKPRRKNPQEGLYNELQKDKMAEAYSEIGMKGERRRGKGHDGLYQGLSTATKDTYDALHMQALPPR

SEQ ID NO: 646 - skipped

SEQ ID NO: 647 - protein, 357 aa, Artificial Sequence
  synthetic polypeptide
MARPHPWWLCVLGTLVGLSATPAPKSCPERHYWAQGKLCCQMCEPGTFLVKDCDQHRKAAQCDPCIPGVSFSPDHHTRPHCESCRHCNSGLLVRNCTITANAECACRNGWQCRDKECTECDPLPNPSLTARSSQALSPHPQPTHLPYVSEMLEARTAGHMQTLADFRQLPARTLSTHWPPQRSLCSSDFIRPFFFCCFIAVAMGIRFIIMVAIWSAVFLNSLCARPRRSPAQEDGKVYINMPGRGRVKFSRSADAPAYQQGQNQLYNELNLGRREEYDVLDKRRGRDPEMGGKPRRKNPQEGLYNELQKDKMAEAYSEIGMKGERRRGKGHDGLYQGLSTATKDTYDALHMQALPPR

SEQ ID NO: 648-650 - skipped (3 entries)

SEQ ID NO: 651 - protein, 5 aa, Artificial Sequence
  synthetic polypeptide
GGGGS

SEQ ID NO: 652 - protein, 15 aa, Artificial Sequence
  synthetic polypeptide
GGGGSGGGGSGGGGS

SEQ ID NO: 653 - protein, 25 aa, Artificial Sequence
  synthetic polypeptide
GGSGGSGGYPYDVPDYAGGGSGGGS

SEQ ID NO: 654 - protein, 24 aa, Artificial Sequence
  synthetic polypeptide
GGSGGSGGGGGSGGGSGGGSGGGS

SEQ ID NO: 655 - protein, 26 aa, Artificial Sequence
  synthetic polypeptide
GGSGGSGGGPEDEPGSGSGGGSGGGS

SEQ ID NO: 656 - protein, 42 aa, Artificial Sequence
  synthetic polypeptide
GGSGGSGGGGGSGGGSGGGSGGGSGSGSGSGSEDGSGSGSGS

SEQ ID NO: 657 - protein, 28 aa, Artificial Sequence
  synthetic polypeptide
GSGSGSGSGSEDEDEDEDGSGSGSGSGS

SEQ ID NO: 658 - protein, 20 aa, Artificial Sequence
  synthetic polypeptide
GGGGSGGGGSGGGGSGGGGS

SEQ ID NO: 659 - protein, 18 aa, Artificial Sequence
  synthetic polypeptide
GSGSGSGSEDGSGSGSGS

SEQ ID NO: 660 - protein, 18 aa, Artificial Sequence
  synthetic polypeptide
GSGSGSGSGSGSGSGSGS

SEQ ID NO: 661 - protein, 15 aa, Artificial Sequence
  synthetic polypeptide
GCGGSGGGGSGGGGS

SEQ ID NO: 662 - protein, 26 aa, Artificial Sequence
  synthetic polypeptide
SGRGGGGSGGGGSGGGGSGGGGSSPA

SEQ ID NO: 663 - protein, 24 aa, Artificial Sequence
  synthetic polypeptide
GGGGSGGGGSGGGGSGGGGSGGGG

SEQ ID NO: 664 - protein, 58 aa, Artificial Sequence
  synthetic polypeptide
SGRGASSGSSGSGSQKKPRYEIRWKVVVISAILALVVLTVISLIILIMLWGSGMQSPA

SEQ ID NO: 665 - skipped

SEQ ID NO: 666 - protein, 21 aa, Artificial Sequence
  synthetic polypeptide
GSGEGRGSLLTCGDVEENPGP

SEQ ID NO: 667 - protein, 22 aa, Artificial Sequence
  synthetic polypeptide
GSGATNFSLLKQAGDVEENPGP

SEQ ID NO: 668 - protein, 218 aa, Artificial Sequence
  synthetic polypeptide
CPARSLLLVATLVLLDHLSLARNLPVATPDPGMFPCLHHSQNLLRAVSNMLQKARQTLEFYPCTSEEIDHEDITKDKTSTVEACLPLELTKNESCLNSRETSFITNGSCLASRKTSFMMALCLSSIYEDLKMYQVEFKTMNAKLLMDPKRQIFLDQNMLAVIDELMQALNFNSETVPQKSSLEEPDFYKTKIKLCILLHAFRIRAVTIDRVMSYLNAS

SEQ ID NO: 669 - protein, 327 aa, Artificial Sequence
  synthetic polypeptide
CHQQLVISWFSLVFLASPLVAIWELKKDVYVVELDWYPDAPGEMVVLTCDTPEEDGITWTLDQSSEVLGSGKTLTIQVKEFGDAGQYTCHKGGEVLSHSLLLLHKKEDGIWSTDILKDQKEPKNKTFLRCEAKNYSGRFTCWWLTTISTDLTFSVKSSRGSSDPQGVTCGAATLSAERVRGDNKEYEYSVECQEDSACPAAEESLPIEVMVDAVHKLKYENYTSSFFIRDIIKPDPPKNLQLKPLKNSRQVEVSWEYPDTWSTPHSYFSLTFCVQVQGKSKREKKDRVFTDKTSATVICRKNASISVRAQDRYYSSSWSEWASVPCS

SEQ ID NO: 670 - protein, 660 aa, Artificial Sequence
  synthetic polypeptide
CPARSLLLVATLVLLDHLSLARNLPVATPDPGMFPCLHHSQNLLRAVSNMLQKARQTLEFYPCTSEEIDHEDITKDKTSTVEACLPLELTKNESCLNSRETSFITNGSCLASRKTSFMMALCLSSIYEDLKMYQVEFKTMNAKLLMDPKRQIFLDQNMLAVIDELMQALNFNSETVPQKSSLEEPDFYKTKIKLCILLHAFRIRAVTIDRVMSYLNASGSGSGSGSGSGSGSGSGSGSGSGSGSGSGSVAISTSTVLLCGLSAVSLLACYLKSRQTPPLASVEMEAMEALPVTWGTSSRDEDLENCSHHLGSGATNFSLLKQAGDVEENPGPMCHQQLVISWFSLVFLASPLVAIWELKKDVYVVELDWYPDAPGEMVVLTCDTPEEDGITWTLDQSSEVLGSGKTLTIQVKEFGDAGQYTCHKGGEVLSHSLLLLHKKEDGIWSTDILKDQKEPKNKTFLRCEAKNYSGRFTCWWLTTISTDLTFSVKSSRGSSDPQGVTCGAATLSAERVRGDNKEYEYSVECQEDSACPAAEESLPIEVMVDAVHKLKYENYTSSFFIRDIIKPDPPKNLQLKPLKNSRQVEVSWEYPDTWSTPHSYFSLTFCVQVQGKSKREKKDRVFTDKTSATVICRKNASISVRAQDRYYSSSWSEWASVPCS

SEQ ID NO: 671 - skipped

SEQ ID NO: 672 - protein, 162 aa, Artificial Sequence
  synthetic polypeptide
MRISKPHLRSISIQCYLCLLLNSHFLTEAGIHVFILGCFSAGLPKTEANWVNVISDLKKIEDLIQSMHIDATLYTESDVHPSCKVTAMKCFLLELQVISLESGDASIHDTVENLIILANNSLSSNGNVTESGCKECEELEEKNIKEFLQSFVHIVQMFINTS

SEQ ID NO: 673 - protein, 114 aa, Homo sapiens
NWVNVISDLKKIEDLIQSMHIDATLYTESDVHPSCKVTAMKCFLLELQVISLESGDASIHDTVENLIILANNSLSSNGNVTESGCKECEELEEKNIKEFLQSFVHIVQMFINTS

SEQ ID NO: 674 - protein, 267 aa, Artificial Sequence
  synthetic polypeptide
MAPRRARGCRTLGLPALLLLLLLRPPATRGITCPPPMSVEHADIWVKSYSLYSRERYICNSGFKRKAGTSSLTECVLNKATNVAHWTTPSLKCIRDPALVHQRPAPPSTVTTAGVTPQPESLSPSGKEPAASSPSSNNTAATTAAIVPGSQLMPSKSPSTGTTEISSHESSHGTPSQTTAKNWELTASASHQPPGVYPQGHSDTTVAISTSTVLLCGLSAVSLLACYLKSRQTPPLASVEMEAMEALPVTWGTSSRDEDLENCSHHL

SEQ ID NO: 675 - protein, 237 aa, Artificial Sequence
  synthetic polypeptide
ITCPPPMSVEHADIWVKSYSLYSRERYICNSGFKRKAGTSSLTECVLNKATNVAHWTTPSLKCIRDPALVHQRPAPPSTVTTAGVTPQPESLSPSGKEPAASSPSSNNTAATTAAIVPGSQLMPSKSPSTGTTEISSHESSHGTPSQTTAKNWELTASASHQPPGVYPQGHSDTTVAISTSTVLLCGLSAVSLLACYLKSRQTPPLASVEMEAMEALPVTWGTSSRDEDLENCSHHL

SEQ ID NO: 676 - protein, 402 aa, Artificial Sequence
  synthetic polypeptide
MDWTWILFLVAAATRVHSNWVNVISDLKKIEDLIQSMHIDATLYTESDVHPSCKVTAMKCFLLELQVISLESGDASIHDTVENLIILANNSLSSNGNVTESGCKECEELEEKNIKEFLQSFVHIVQMFINTSSGGGSGGGGSGGGGSGGGGSGGGGSGGGGSGGGITCPPPMSVEHADIWVKSYSLYSRERYICNSGFKRKAGTSSLTECVLNKATNVAHWTTPSLKCIRDPALVHQRPAPPSTVTTAGVTPQPESLSPSGKEPAASSPSSNNTAATTAAIVPGSQLMPSKSPSTGTTEISSHESSHGTPSQTTAKNWELTASASHQPPGVYPQGHSDTTVAISTSTVLLCGLSAVSLLACYLKSRQTPPLASVEMEAMEALPVTWGTSSRDEDLENCSHHL

SEQ ID NO: 677 - protein, 201 aa, Artificial Sequence
  synthetic polypeptide
MDWTWILFLVAAATRVHSNWVNVISDLKKIEDLIQSMHIDATLYTESDVHPSCKVTAMKCFLLELQVISLESGDASIHDTVENLIILANNSLSSNGNVTESGCKECEELEEKNIKEFLQSFVHIVQMFINTSTTTPAPRPPTPAPTIASQPLSLRPEACRPAAGGAVHTRGLDFACDIYIWAPLAGTCGVLLLSLVITLYC

SEQ ID NO: 678 - protein, 224 aa, Artificial Sequence
  synthetic polypeptide
MDWTWILFLVAAATRVHSNWVNVISDLKKIEDLIQSMHIDATLYTESDVHPSCKVTAMKCFLLELQVISLESGDASIHDTVENLIILANNSLSSNGNVTESGCKECEELEEKNIKEFLQSFVHIVQMFINTSGSGSGSGSGSGSGSGSGSGSGSGSGSGSGSVAISTSTVLLCGLSAVSLLACYLKSRQTPPLASVEMEAMEALPVTWGTSSRDEDLENCSHHL

SEQ ID NO: 679 - protein, 198 aa, Homo sapiens
GRGLLRGLWPLHIVLWTRIASTIPPHVQKSVNNDMIVTDNNGAVKFPQLCKFCDVRFSTCDNQKSCMSNCSITSICEKPQEVCVAVWRKNDENITLETVCHDPKLPYHDFILEDAASPKCIMKEKKKPGETFFMCSCSSDECNDNIIFSEEYNTSNPDLLLVIFQVTGISLLPPLGVAISVIIIFYCYRVNRQQKLSS

SEQ ID NO: 680 - protein, 171 aa, Artificial Sequence
  synthetic polypeptide
MQIPQAPWPVVWAVLQLGWRPGWFLDSPDRPWNPPTFSPALLVVTEGDNATFTCSFSNTSESFVLNWYRMSPSNQTDKLAAFPEDRSQPGQDCRFRVTQLPNGRDFHMSVVRARRNDSGTYLCGAISLAPKAQIKESLRAELRVTERRAEVPTAHPSPSPRPAGQFQTLVV

SEQ ID NO: 681 - protein, 636 aa, Artificial Sequence
  synthetic polypeptide
MMLNWLKSGKLESQSQEQSSCYLENSNCLPPTLDSTDIIGEENKAGTTSRKKRKYDEDYLNFGFTWTGDKDEPNGLCVICEQVVNNSSLNPAKLKRHLDTKHPTLKGKSEYFKRKCNELNQKKHTFERYVRDDNKNLLKASYLVSLRIAKQGEAYTIAEKLIKPCTKDLTTCVFGEKFASKVDLVPLSDTTISRRIEDMSYFCEAVLVNRLENAKCGFTLQMDESTDVAGLAILLVFVRYIHESSFEEDMLFCKALPTQTTGEEIFNLLNAYFEKHSIPWNLCYHICTDGAKAMVGVIKGVIARIKKLVPDIKASHCCLHRHALAVKRIPNALHEVLNDAVKMINFIKSRPLNARVFALLCDDLGSLHKNLLLHTEVRWLSRGKVLTRFWELRDEIRIFFNEREFAGKLNDTSWLQNLAYIADIFSYLNEVNLSLQGPNSTIFKVNSRINSIKSKLKLWEECITKNNTECFANLNDFLETSNTALDPNLKSNILEHLNGLKNTFLEYFPPTCNNISWVENPFNECGNVDTLPIKEREQLIDIRTDTTLKSSFVPDGIGPFWIKLMDEFPEISKRAVKELMPFVTTYLCEKSFSVYVATKTKYRNRLDAEDDMRLQLTTIHPDIDNLCNNKQAQKSH

SEQ ID NO: 682 - protein, 1911 aa, Artificial Sequence
  synthetic polypeptide
ATGATGTTGAATTGGCTGAAAAGTGGAAAGCTTGAAAGTCAATCACAGGAACAGAGTTCCTGCTACCTTGAGAACTCTAACTGCCTGCCACCAACGCTCGATTCTACAGATATTATCGGTGAAGAGAACAAAGCTGGTACCACCTCTCGCAAGAAGCGGAAATATGACGAGGACTATCTGAACTTCGGTTTTACATGGACTGGCGACAAGGATGAGCCCAACGGACTTTGTGTGATTTGCGAGCAGGTAGTCAACAATTCCTCACTTAACCCGGCCAAACTGAAACGCCATTTGGACACAAAGCATCCGACGCTTAAAGGCAAGAGCGAATACTTCAAAAGAAAATGTAACGAGCTCAATCAAAAGAAGCATACTTTTGAGCGATACGTAAGGGACGATAACAAGAACCTCCTGAAAGCTTCTTATCTCGTCAGTTTGAGAATAGCTAAACAGGGCGAGGCATATACCATAGCGGAGAAGTTGATCAAGCCTTGCACCAAGGATCTGACAACTTGCGTATTTGGAGAAAAATTCGCGAGCAAAGTTGATCTCGTCCCCCTGTCCGACACGACTATTTCAAGGCGAATCGAAGACATGAGTTACTTCTGTGAAGCCGTGCTGGTGAACAGGTTGAAAAATGCTAAATGTGGGTTTACGCTGCAGATGGACGAGTCAACAGATGTTGCCGGTCTTGCAATCCTGCTTGTGTTTGTTAGGTACATACATGAAAGCTCTTTTGAGGAGGATATGTTGTTCTGCAAAGCACTTCCCACTCAGACGACAGGGGAGGAGATTTTCAATCTTCTCAATGCCTATTTCGAAAAGCACTCCATCCCATGGAATCTGTGTTACCACATTTGCACAGACGGTGCCAAGGCAATGGTAGGAGTTATTAAAGGAGTCATAGCGAGAATAAAAAAACTCGTCCCTGATATAAAAGCTAGCCACTGTTGCCTGCATCGCCACGCTTTGGCTGTAAAGCGAATACCGAATGCATTGCACGAGGTGCTCAATGACGCTGTTAAAATGATCAACTTCATCAAGTCTCGGCCGTTGAATGCGCGCGTCTTCGCTTTGCTGTGTGACGATTTGGGGAGCCTGCATAAAAATCTTCTTCTTCATACCGAAGTGAGGTGGCTGTCTAGAGGAAAGGTGCTGACCCGATTTTGGGAACTGAGAGATGAAATTAGAATTTTCTTCAACGAAAGGGAATTTGCCGGGAAATTGAACGACACCAGTTGGTTGCAAAATTTGGCATATATAGCTGACATATTCAGTTATCTGAATGAAGTTAATCTTTCCCTGCAAGGGCCGAATAGCACAATCTTCAAGGTAAATAGCCGCATTAACAGTATTAAATCAAAGTTGAAGTTGTGGGAAGAGTGTATAACGAAAAATAACACTGAGTGTTTTGCGAACCTCAACGATTTTTTGGAAACTTCAAACACTGCGTTGGATCCAAACCTGAAGTCTAATATTTTGGAACATCTCAACGGTCTTAAGAACACCTTTCTGGAGTATTTTCCACCTACGTGTAATAATATCTCCTGGGTGGAGAATCCTTTCAATGAATGCGGTAACGTCGATACACTCCCAATAAAAGAGAGGGAACAATTGATTGACATACGGACTGATACGACATTGAAATCTTCATTCGTGCCTGATGGTATAGGACCATTCTGGATCAAACTGATGGACGAATTTCCAGAAATTAGCAAACGAGCTGTCAAAGAGCTCATGCCATTTGTAACCACTTACCTCTGTGAGAAATCATTTTCCGTCTATGTAGCCACAAAAACAAAATATCGAAATAGACTTGATGCTGAAGACGATATGCGACTCCAACTTACTACTATCCATCCAGACATTGACAACCTTTGTAACAACAAGCAGGCTCAGAAATCCCACTGA

SEQ ID NO: 683 - protein, 206 aa, Staphylococcus aureus
MKKWTNRLMTIAGVVLILVAAYLFAKPHIDNYLHDKDKDEKIEQYDKNVKEQASKDNKQQAKPQIPKDKSKVAGYIEIPDADIKEPVYPGPATPEQLNRGVSFAEENESLDDQNISIAGHTFIDRPNYQFTNLKAAKKGSMVYFKVGNETRKYKMTSIRDVKPTDVEVLDEQKGKDKQLTLITCDDYNEKTGVWEKRKIFVATEVK

SEQ ID NO: 684 - protein, 156 aa, Artificial Sequence
  synthetic polypeptide
MQAKPQIPKDKSKVAGYIEIPDADIKEPVYPGPATREQLNRGVSFAKENQSLDDQNISIAGHTFIDRPNYQFTNLKAAKKGSMVYFKVGNETRKYKMTSIRNVKPTAVEVLDEQKGKDKQLTLITCDDYNEETGVWETRKIFVATEVKLEHHHHHH

SEQ ID NO: 685 - protein, 5 aa, Artificial Sequence
  synthetic polypeptide
  misc_feature (3)..(3): Xaa can be any naturally occurring amino acid
LPXTG

SEQ ID NO: 686 - protein, 5 aa, Artificial Sequence
  synthetic polypeptide
  misc_feature (3)..(3): Xaa can be any naturally occurring amino acid
LPXTA

SEQ ID NO: 687 - DNA, 18 bp, Artificial Sequence
  synthetic polypeptide
tgctgttgaggagctgga

SEQ ID NO: 688 - DNA, 18 bp, Artificial Sequence
  synthetic polypeptide
agcacaccaggcagagtt

SEQ ID NO: 689 - DNA, 18 bp, Artificial Sequence
  synthetic polypeptide
cggctgaggagcggaaga

SEQ ID NO: 690 - DNA, 18 bp, Artificial Sequence
  synthetic polypeptide
tggaggtgagcaatcccc

SEQ ID NO: 691 - DNA, 20 bp, Artificial Sequence
  synthetic polypeptide
ttaatacgactcactatagg

SEQ ID NO: 692 - DNA, 20 bp, Artificial Sequence
  synthetic polypeptide
gttttagagctagaaatagc

SEQ ID NO: 693 - protein, 118 aa, Artificial Sequence
  synthetic polypeptide
QVQLVQSGAEVKKPGASVKVSCKASGYTFTNYGMNWVRQAPGQGLEWMGWINTYTGEPTYADAFKGRFAFSLDTSTSTAYLQINSLRSDDTAVYYCARDYGDYGMDYWGQGTTVTVSS

SEQ ID NO: 694 - protein, 118 aa, Artificial Sequence
  synthetic polypeptide
QVQLVQSGAEVKKPGASVKVSCKASGYTFTNYGMNWVRQAPGQGLKWMGWINTYTGEPTYADAFKGRVTMTRDTSISTAYMELSRLRSDDTAVYYCARDYGDYGMDYWGQGTTVTVSS

SEQ ID NO: 695 - protein, 118 aa, Artificial Sequence
  synthetic polypeptide
QVQLVQSGAEVKKPGASVKVSCKASGYTFTNYGMNWVRQAPGQGLKWMGWINTYTGEPTYADAFKGRFAFSLDTSTSTAYMELRSLRSDDTAVYYCARDYGDYGMDYWGQGTTVTVSS

SEQ ID NO: 696 - protein, 229 aa, Artificial Sequence
  synthetic polypeptide
ESKYGPPCPSCPAPEFLGGPSVFLFPPKPKDTLMISRTPEVTCVVVDVSQEDPEVQFNWYVDGVEVHNAKTKPREEQFNSTYRVVSVLTVLHQDWLNGKEYKCKVSNKGLPSSIEKTISKAKGQPREPQVYTLPPSQEEMTKNQVSLTCLVKGFYPSDIAVEWESNGQPENNYKTTPPVLDSDGSFFLYSRLTVDKSRWQEGNVFSCSVMHEALHNHYTQKSLSLSLGK

SEQ ID NO: 697 - protein, 21 aa, Homo sapiens
LVPVFCGLLVAKSLVLSALLV

SEQ ID NO: 698 - protein, 21 aa, Homo sapiens
MGLAFLVLVALVWFLVEDWLS

SEQ ID NO: 699 - protein, 41 aa, Homo sapiens
RSKRSRLLHSDYMNMTPRRPGPTRKHYQPYAPPRDFAAYRS

SEQ ID NO: 700 - protein, 385 aa, Homo sapiens
MARPHPWWLCVLGTLVGLSATPAPKSCPERHYWAQGKLCCQMCEPGTFLVKDCDQHRKAAQCDPCIPGVSFSPDHHTRPHCESCRHCNSGLLVRNCTITANAECACRNGWQCRDKECTECDPLPNPSLTARSSQALSPHPQPTHLPYVSEMLEARTAGHMQTLADFRQLPARTLSTHWPPQRSLCSSDFIRPFFFCCFIAVAMGIRFIIMVAIWSAVFLNSYFLGRLVPRGRGAAEAATRKQRITETESPYQELQGQRSDVYSDLNTQRPYYKRVKFSRSADAPAYQQGQNQLYNELNLGRREEYDVLDKRRGRDPEMGGKPRRKNPQEGLYNELQKDKMAEAYSEIGMKGERRRGKGHDGLYQGLSTATKDTYDALHMQALPPR

SEQ ID NO: 701 - protein, 961 aa, Artificial Sequence
  synthetic polypeptide
MARPHPWWLCVLGTLVGLSATPAPKSCPERHYWAQGKLCCQMCEPGTFLVKDCDQHRKAAQCDPCIPGVSFSPDHHTRPHCESCRHCNSGLLVRNCTITANAECACRNGWQCRDKECTECDPLPNPSLTARSSQALSPHPQPTHLPYVSEMLEARTAGHMQTLADFRQLPARTLSTHWPPQRSLCSSDFIRILVIFSGMFLVFTLAGALFLHQRRKYRSNKGESPVEPAEPCHYSCPREEEGSTIPIQEDYRKPEPACSPRVKFSRSADAPAYQQGQNQLYNELNLGRREEYDVLDKRRGRDPEMGGKPRRKNPQEGLYNELQKDKMAEAYSEIGMKGERRRGKGHDGLYQGLSTATKDTYDALHMQALPPRGSGATNFSLLKQAGDVEENPGPCPARSLLLVATLVLLDHLSLARNLPVATPDPGMFPCLHHSQNLLRAVSNMLQKARQTLEFYPCTSEEIDHEDITKDKTSTVEACLPLELTKNESCLNSRETSFITNGSCLASRKTSFMMALCLSSIYEDLKMYQVEFKTMNAKLLMDPKRQIFLDQNMLAVIDELMQALNFNSETVPQKSSLEEPDFYKTKIKLCILLHAFRIRAVTIDRVMSYLNASGSGATNFSLLKQAGDVEENPGPCHQQLVISWFSLVFLASPLVAIWELKKDVYVVELDWYPDAPGEMVVLTCDTPEEDGITWTLDQSSEVLGSGKTLTIQVKEFGDAGQYTCHKGGEVLSHSLLLLHKKEDGIWSTDILKDQKEPKNKTFLRCEAKNYSGRFTCWWLTTISTDLTFSVKSSRGSSDPQGVTCGAATLSAERVRGDNKEYEYSVECQEDSACPAAEESLPIEVMVDAVHKLKYENYTSSFFIRDIIKPDPPKNLQLKPLKNSRQVEVSWEYPDTWSTPHSYFSLTFCVQVQGKSKREKKDRVFTDKTSATVICRKNASISVRAQDRYYSSSWSEWASVPCS

SEQ ID NO: 702 - protein, 843 aa, Artificial Sequence
  synthetic polypeptide
MARPHPWWLCVLGTLVGLSATPAPKSCPERHYWAQGKLCCQMCEPGTFLVKDCDQHRKAAQCDPCIPGVSFSPDHHTRPHCESCRHCNSGLLVRNCTITANAECACRNGWQCRDKECTECDPLPNPSLTARSSQALSPHPQPTHLPYVSEMLEARTAGHMQTLADFRQLPARTLSTHWPPQRSLCSSDFIRILVIFSGMFLVFTLAGALFLHQRRKYRSNKGESPVEPAEPCHYSCPREEEGSTIPIQEDYRKPEPACSPRVKFSRSADAPAYQQGQNQLYNELNLGRREEYDVLDKRRGRDPEMGGKPRRKNPQEGLYNELQKDKMAEAYSEIGMKGERRRGKGHDGLYQGLSTATKDTYDALHMQALPPRGSGATNFSLLKQAGDVEENPGPRISKPHLRSISIQCYLCLLLNSHFLTEAGIHVFILGCFSAGLPKTEANWVNVISDLKKIEDLIQSMHIDATLYTESDVHPSCKVTAMKCFLLELQVISLESGDASIHDTVENLIILANNSLSSNGNVTESGCKECEELEEKNIKEFLQSFVHIVQMFINTSGSGATNFSLLKQAGDVEENPGPAPRRARGCRTLGLPALLLLLLLRPPATRGITCPPPMSVEHADIWVKSYSLYSRERYICNSGFKRKAGTSSLTECVLNKATNVAHWTTPSLKCIRDPALVHQRPAPPSTVTTAGVTPQPESLSPSGKEPAASSPSSNNTAATTAAIVPGSQLMPSKSPSTGTTEISSHESSHGTPSQTTAKNWELTASASHQPPGVYPQGHSDTTVAISTSTVLLCGLSAVSLLACYLKSRQTPPLASVEMEAMEALPVTWGTSSRDEDLENCSHHL

SEQ ID NO: 703 - protein, 645 aa, Artificial Sequence
  synthetic polypeptide
MARPHPWWLCVLGTLVGLSATPAPKSCPERHYWAQGKLCCQMCEPGTFLVKDCDQHRKAAQCDPCIPGVSFSPDHHTRPHCESCRHCNSGLLVRNCTITANAECACRNGWQCRDKECTECDPLPNPSLTARSSQALSPHPQPTHLPYVSEMLEARTAGHMQTLADFRQLPARTLSTHWPPQRSLCSSDFIRILVIFSGMFLVFTLAGALFLHQRRKYRSNKGESPVEPAEPCHYSCPREEEGSTIPIQEDYRKPEPACSPRVKFSRSADAPAYQQGQNQLYNELNLGRREEYDVLDKRRGRDPEMGGKPRRKNPQEGLYNELQKDKMAEAYSEIGMKGERRRGKGHDGLYQGLSTATKDTYDALHMQALPPRGSGATNFSLLKQAGDVEENPGPMGRGLLRGLWPLHIVLWTRIASTIPPHVQKSVNNDMIVTDNNGAVKFPQLCKFCDVRFSTCDNQKSCMSNCSITSICEKPQEVCVAVWRKNDENITLETVCHDPKLPYHDFILEDAASPKCIMKEKKKPGETFFMCSCSSDECNDNIIFSEEYNTSNPDLLLVIFQVTGISLLPPLGVAISVIIIFYCYRVNRQQKLSSYFLGRLVPRGRGAAEAATRKQRITETESPYQELQGQRSDVYSDLNTQRPYYK

SEQ ID NO: 704 - protein, 657 aa, Artificial Sequence
  synthetic polypeptide
MARPHPWWLCVLGTLVGLSATPAPKSCPERHYWAQGKLCCQMCEPGTFLVKDCDQHRKAAQCDPCIPGVSFSPDHHTRPHCESCRHCNSGLLVRNCTITANAECACRNGWQCRDKECTECDPLPNPSLTARSSQALSPHPQPTHLPYVSEMLEARTAGHMQTLADFRQLPARTLSTHWPPQRSLCSSDFIRILVIFSGMFLVFTLAGALFLHQRRKYRSNKGESPVEPAEPCHYSCPREEEGSTIPIQEDYRKPEPACSPRVKFSRSADAPAYQQGQNQLYNELNLGRREEYDVLDKRRGRDPEMGGKPRRKNPQEGLYNELQKDKMAEAYSEIGMKGERRRGKGHDGLYQGLSTATKDTYDALHMQALPPRGSGATNFSLLKQAGDVEENPGPMQIPQAPWPVVWAVLQLGWRPGWFLDSPDRPWNPPTFSPALLVVTEGDNATFTCSFSNTSESFVLNWYRMSPSNQTDKLAAFPEDRSQPGQDCRFRVTQLPNGRDFHMSVVRARRNDSGTYLCGAISLAPKAQIKESLRAELRVTERRAEVPTAHPSPSPRPAGQFQTLVVLRPVQAQAQSDCSCSTVSPGVLAGIVMGDLVLTVLIALAVYFLGRLVPRGRGAAEAATRKQRITETESPYQELQGQRSDVYSDLNTQRPYYK

SEQ ID NO: 705 - protein, 23 aa, Artificial Sequence
  synthetic polypeptide
GSGQCTNYALLKLAGDVESNPGP

SEQ ID NO: 706 - protein, 25 aa, Artificial Sequence
  synthetic polypeptide
GSGVKQTLNFDLLKLAGDVESNPGP

SEQ ID NO: 707-709 - skipped (3 entries)

SEQ ID NO: 710 - protein, 21 aa, Artificial Sequence
  synthetic polypeptide
MALPVTALLLPLALLLHAARP

SEQ ID NO: 711 - protein, 19 aa, Homo sapiens
MARPHPWWLCVLGTLVGLS

SEQ ID NO: 712 - protein, 120 aa, Homo sapiens
QVQLVESGGGVVQPGRSLRLSCAASGFTFSTYGMHWVRQAPGKGLEWVAVIWYDGSNKYYGDSVKGRFTISRDNSKNTLYLQMNSLRAEDTAVYYCARDNSHYYYGMDVWGQGTTVTVSS

SEQ ID NO: 713 - protein, 111 aa, Artificial Sequence
  synthetic polypeptide
QSVLTQPPSVSGAPGQRVTISCTGSSSNIGAGYDVNWYQQFPGTAPKLLIYVNNNRPSGVPDRFSGSTSGTSASLAITGLQAEDEADYYCQSYDTSLSASVFGGGTRLTVL

SEQ ID NO: 714 - protein, 122 aa, Artificial Sequence
  synthetic polypeptide
QVQLVESGGGVVQPGRSLRLSCAASGFTFSSYGMHWVRQAPGKGLEWVAVIWYDGSDKYFADSVKGRFTISRDNSKNTLYLQMNSLRAEDTAVYYCARDGIAGARYVYFDYWGQGTLVTVSS

SEQ ID NO: 715 - protein, 107 aa, Artificial Sequence
  synthetic polypeptide
DIQMTQSPSSLSASVGDRVTITCRASQGISNYLAWFQQKPGKAPKSLIYAASSLQGGVPSKFSGSGSGTDFTLTISSLQPEDFATYYCQQYYNYPFTFGPGTTVDIK

SEQ ID NO: 716 - protein, 122 aa, Artificial Sequence
  synthetic polypeptide
QEQLVESGGGVVQPGRSLRLSCAASGFTFSSYGMHWVRQAPGKGLEWVAVTWYDGSNKYYGDSVKGRFTISRDNSKNTLYLQMNSLRAEDTAVYYCARDLLRGVKGYAMDVWGQGTTVTVSS

SEQ ID NO: 717 - protein, 108 aa, Artificial Sequence
  synthetic polypeptide
EIVLTQSPGTLSLSPGERATLSCRASQSLRRIYLAWYQQKPGQAPRLLIYDVFDRATGIPDRFSGGGSGTDFTLTISRLEPEDFAVYYCQQYSDSPFTFGPGTKVDIK

SEQ ID NO: 718 - protein, 121 aa, Artificial Sequence
  synthetic polypeptide
QVQLVQSGAEVKKPGASVKVSCKASGYTFTSYGISWVRQAPGQGLEWMGWISAYNGYTHYAQKLQGRVTMTTDTSTSTAYMELRSLRSDDTAVYYCARDYGGNDYYGMDVWGQGTTVTVSS

SEQ ID NO: 719 - protein, 110 aa, Artificial Sequence
  synthetic polypeptide
QSVLTQPPSASGTPGQRVTISCSGSSSNIGINYVYWYQQLPGTAPKLLIYRSDQRPSGVPDRFSGSKSGTSASLALSGLRSEDEADYYCAAWDDSLSGVVFGGGTKLTVL

SEQ ID NO: 720 - protein, 120 aa, Artificial Sequence
  synthetic polypeptide
QVQLQESGPGLVKPSQTLSLTCTVSGDSIISGGYYWSWIRQHPGKGLEWIGYIFYSGSTDYNPSLKSRVTISVDTSKNQFSLKLSSVTAADTAVYYCARSGYSYALFDHWGQGTLVTVSS

SEQ ID NO: 721 - protein, 107 aa, Artificial Sequence
  synthetic polypeptide
DIQMTQSPSSLSASVGDRVTISCRASQFIGRYFNWYQQQPGKAPKVLIYAESSLQSGVPSRFSGSGSGTEFTLTISSLQPEDFARYYCQQSYSTPWTFGQGTKVEIK

SEQ ID NO: 722 - protein, 120 aa, Artificial Sequence
  synthetic polypeptide
QVQLQESGPGLVKPSQTLSLTCTVSGDSIISGGYYWSWIRQHPGKCLEWIGYIFYSGSTDYNPSLKSRVTISVDTSKNQFSLKLSSVTAADTAVYYCARSGYSYALFDHWGQGTLVTVSS

SEQ ID NO: 723 - protein, 107 aa, Artificial Sequence
  synthetic polypeptide
DIQMTQSPSSLSASVGDRVTISCRASQFIGRYFNWYQQQPGKAPKVLIYAESSLQSGVPSRFSGSGSGTEFTLTISSLQPEDFARYYCQQSYSTPFTFGCGTKVEIK

SEQ ID NO: 724 - protein, 118 aa, Artificial Sequence
  synthetic polypeptide
QVHLVQSGAEVKKPGASVRVSCKASGYTFTSYYLHWVRQAPGQCLEWMGIVDPSGGSTSYDQKFQGRFTMTRDTSTSTVYMELSSLRSEDTAVYYCARDYGDYVFDYWGQGTLVTVSS

SEQ ID NO: 725 - protein, 110 aa, Artificial Sequence
  synthetic polypeptide
QSVLTQPPSASGTPGQRVTISCSGSSSNIGTNTVNWYQQLPGTAPQLLIYINNQRPSGVPDRFSGSKSGTSASLAISGLQSEDEADYYCATWDDSLNGPVVGCGTKLTVL

SEQ ID NO: 726 - protein, 122 aa, Artificial Sequence
  synthetic polypeptide
QVQLVESGGGVVQPGRSLRLSCAASGFTFSSYGMHWVRQAPGKCLEWVAVIWYDGSDKYFADSVKGRFTISRDNSKNTLYLQMNSLRAEDTAVYYCARDGIAGARYVYFDYWGQGTLVTVSS

SEQ ID NO: 727 - protein, 107 aa, Artificial Sequence
  synthetic polypeptide
DIQMTQSPSSLSASVGDRVTITCRASQGISNYLAWFQQKPGKAPKSLIYAASSLQGGVPSKFSGSGSGTDFTLTISSLQPEDFATYYCQQYYNYPFTFGCGTTVDIK

SEQ ID NO: 728 - protein, 121 aa, Artificial Sequence
  synthetic polypeptide
QVQLVQSGAEVKKPGASVKVSCKASGYTFTSYGISWVRQAPGQCLEWMGWISAYNGYTHYAQKLQGRVTMTTDTSTSTAYMELRSLRSDDTAVYYCARDYGGNDYYGMDVWGQGTTVTVSS

SEQ ID NO: 729 - protein, 110 aa, Artificial Sequence
  synthetic polypeptide
QSVLTQPPSASGTPGQRVTISCSGSSSNIGINYVYWYQQLPGTAPKLLIYRSDQRPSGVPDRFSGSKSGTSASLALSGLRSEDEADYYCAAWDDSLSGVVFGCGTKLTVL

SEQ ID NO: 730 - protein, 120 aa, Artificial Sequence; identical to SEQ ID NO: 722
  synthetic polypeptide

SEQ ID NO: 731 - protein, 107 aa, Artificial Sequence
  synthetic polypeptide
DIQMTQSPSSLSASVGDRVTISCRASQFIGRYFNWYQQQPGKAPKVLIYAESSLQSGVPSRFSGSGSGTEFTLTISSLQPEDFARYYCQQSYSTPWTFGCGTKVEIK

SEQ ID NO: 732 - protein, 120 aa, Artificial Sequence
  synthetic polypeptide
QVQLVESGGGVVQPGRSLRLSCAASGFTFSTYGMHWVRQAPGKCLEWVAVIWYDGSNKYYGDSVKGRFTISRDNSKNTLYLQMNSLRAEDTAVYYCARDNSHYYYGMDVWGQGTTVTVSS

SEQ ID NO: 733 - protein, 111 aa, Artificial Sequence
  synthetic polypeptide
QSVLTQPPSVSGAPGQRVTISCTGSSSNIGAGYDVNWYQQFPGTAPKLLIYVNNNRPSGVPDRFSGSTSGTSASLAITGLQAEDEADYYCQSYETSLSASVFGCGTRLTVL

SEQ ID NO: 734 - protein, 121 aa, Artificial Sequence
  synthetic polypeptide
QAQLVESGGGVVQPGRSLRLSCAASGFTFSYYGMHWVRQAPGKCLEWVAVIWYDGSNKYYADSVKGRFTISRDNSKNTLYLQMNSLRAEDTAVYYCARDREMGSRGDFDYWGQGTLVTVSS

SEQ ID NO: 735 - protein, 107 aa, Artificial Sequence
  synthetic polypeptide
DIQMTQSPSSLSASVGDRVTITCRASQGINNYLAWFQQKPGKAPKSLIYAVSILQSGVPSKFSGSGSGTDFTLTIGNLQPEDFATYYCQQYNFYPFSFGCGTKVDIK

SEQ ID NO: 736 - protein, 120 aa, Artificial Sequence
  synthetic polypeptide
EVQLLESGGGLVQPGGSLRLSCAASGFTFSSYAMSWVRQAPGKGLEWVSVISGSGGRPNYADSVKGRFTISRDNSKNTLYLQMNSLRDEDTAVYYCAKVDYSNYLFFDYWGQGTLVTVSS

SEQ ID NO: 737 - protein, 108 aa, Artificial Sequence
  synthetic polypeptide
EIVLTQSPGTLSLSPGEGATLSCRAGQSVRSSYLGWYQQKPGQAPRLLIYGASSRATGIPDRFSGSGSGTDFTLTISRLEPEDFAVYYCQQYGYSPPTFGGGTKLEIK

SEQ ID NO: 738 - protein, 120 aa, Artificial Sequence
  synthetic polypeptide
EVQLLESGGGLVQPGGSLKLSCAASGFTFSIYAMSWVRQAPGKGLEWVSAISGSGGSTFYADSVKGRFTISRDNSKNTLYLQMNSLRAEDTAVYYCAKHDYSNYPYFDYWGQGTLVTVSS

SEQ ID NO: 739 - protein, 108 aa, Artificial Sequence
  synthetic polypeptide
EIVLTQSPGTLSLSPGERATLSCRASQSVRSSYLAWYQQKPGQAPRLLIYGASSRATGIPDRFSGSGSGTDFTLTISRLEPEDFAVYYCQQYGDLPFTFGPGTKLEIK

SEQ ID NO: 740 - protein, 120 aa, Artificial Sequence
  synthetic polypeptide
EVQLLESGGGMVQPGGSLRLSCAASGFTFSSYAMSWVRQAPGKGLEWVSAISGSGGRTFYADSVEGRFTISRDNSKNTLFLQMNSLRAEDTAVYYCAKHDYSNYPYFDYWGQGTLVTVSS

SEQ ID NO: 741 - protein, 108 aa, Artificial Sequence
  synthetic polypeptide
EIVLTQSPGTLSLSPGERATLSCRASQSVRSSYLAWYQQKPGQAPRLLIYGASSRATGIPDRFSGSGSGTDFTLTISRLEPEDFAVYYCQQYGSSPFTFGPGTKLEIK

SEQ ID NO: 742 - protein, 120 aa, Artificial Sequence
  synthetic polypeptide
EVQLLESGGGMVQPGGSLRLSCAASGFTFSSYAMSWVRQAPGKGLEWVSAISGSGGRTFYADSVEGRFTISRDNSKNTLYLQMNSLRAEDTAVYYCAKHDYSNYPYFDYWGQGTLVTVSS

SEQ ID NO: 743 - protein, 108 aa, Artificial Sequence
  synthetic polypeptide
EIVLTQSPGTLSLSPGERATLSCRASQSIRSSYLAWYQQKPGQAPRLLIYGASSRATGIPDRFSGSGSGTDFTLTISRLEPEDFAVYYCQQYGDLPFTFGPGTKLEIK

SEQ ID NO: 744 - protein, 120 aa, Artificial Sequence
  synthetic polypeptide
EVQLLESGGGLVQSGGSLRLSCAASGFTFSSYAMSWVRQAPGKGLEWVSAISGSGGRTHYADSVKGRFTISRDNSKNTLYLQMNSLRAEDTAVYYCAKHDYSNYPYFDYWGQGTLVTVSS

SEQ ID NO: 745 - protein, 108 aa, Artificial Sequence; identical to SEQ ID NO: 741
  synthetic polypeptide

SEQ ID NO: 746 - protein, 120 aa, Artificial Sequence
  synthetic polypeptide
EVQLLESGGGLVQPGGSLRLSCAASGFTFSSYAMSWVRQAPGKGLEWVSLISGSGGRTHYADSVKGRFTISRDNSKNTLYLQMNSLRAEDTAVYYCAKHDYSNYPYFDYWGQGTLVTVSS

SEQ ID NO: 747 - protein, 108 aa, Artificial Sequence
  synthetic polypeptide
EIVLTQSPGTLSLSPGERATLSCRASQSVRSTYLAWYQQKPGQAPRLLIYDASSRATGIPDRFSGSGSGTDFTLTISRLEPEDFAVYFCQQYGSSPPTFGGGTKLEIK

SEQ ID NO: 748 - protein, 120 aa, Artificial Sequence
  synthetic polypeptide
EVQLLESGGGLVQPGGSLRLSCAASGFTFSTYAMSWVRQAPGKGLEWVSAISGSGGSTFYADSVKGRFTISRDNSKNTLSLQMNSLRAEDTAVYYCAKHDYSNYPYFDYWGQGTLVTVSS

SEQ ID NO: 749 - protein, 108 aa, Artificial Sequence; identical to SEQ ID NO: 739
  synthetic polypeptide

SEQ ID NO: 750 - protein, 120 aa, Artificial Sequence
  synthetic polypeptide
EVQLLESGGGLVQPGGSLRLSCAASGFTFSTYAMSWVRQAPGKGLEWVSLISGSGGRTYYADSVKGRFTISRDNSKNTLYLQMNSLRAEDTAVYYCAKHDYSNYPYFDYWGQGTLVTVSS

SEQ ID NO: 751 - protein, 108 aa, Artificial Sequence
  synthetic polypeptide
EIVLTQSPGTLSLSPGERATLSCRASQGVRSDYLAWYQQKPGQALRLLIYGASSRATGIPDRFSGSGSGTDFTLTISRLEPEDFAVYHCQQYGSTPPTFGGGTKLEIK

SEQ ID NO: 752 - protein, 120 aa, Artificial Sequence
  synthetic polypeptide
EVQLLESGGGMVQPGGSLRLSCAASGFTFSTYAMSWVRQAPGKGLEWVSAISGSGGRTFYADSVEGRFTISRDNSKNTLYLQMNSLRAEDTAVYYCAKHDYSNYPYFDYWGQGTLVTVSS

SEQ ID NO: 753 - protein, 108 aa, Artificial Sequence
  synthetic polypeptide
EIVLTQSPGTLSLSPGERATLSCRASQSVRSTYLAWYQQKPGQAPRLLIYGASSRATGIPDRFSGSGSGTDFTLTISRLEPEDFAVYSCQQYGDLPFTFGPGTKLEIK

SEQ ID NO: 754 - protein, 120 aa, Artificial Sequence
  synthetic polypeptide
EVQLLESGGGLVQPGGSLRLSCAASGFTFSSYAMSWVRQAPGKGLEWVSAISGSGGYTYYADSVKGRFTISRDNSKNTLYLQMNSLRAEDTAVYYCAKHDYSNYPYFDYWGQGTLVTVSS

SEQ ID NO: 755 - protein, 108 aa, Artificial Sequence
  synthetic polypeptide
EIVLTQSPGTLSLSPGERATLSCRASQSVRSNYLAWYQQKPGQAPRLLIYGASSRATGIPDRFSGSGSGTDFTLTISRLEPEDFAVYYCQQYGDLPFTFGPGTKVEIK

SEQ ID NO: 756 - protein, 120 aa, Artificial Sequence
  synthetic polypeptide
EVQLLESGGGLVQPGGSLRLSCAASGFTFSVYAMSWVRQAPGKGLEWVSTISDSGGSTFYADSVKGRFTISRDNSKNTLYLQMNRLRAEDTAVYYCARHDYSNYAYFDYWGQGTLVTVSS

SEQ ID NO: 757 - protein, 108 aa, Artificial Sequence
  synthetic polypeptide
EIVLTQSPGTLSLSPGERATLSCRASQSVRSSYLAWYQQKPGQAPRLLIYGASSRATGIPDRFSGSGSGTDFTLTISRLEPEDFAVYYCQQYGDLPFTFGPGTKVEIK

SEQ ID NO: 758 - protein, 120 aa, Artificial Sequence
  synthetic polypeptide
EVQLLESGGGLAQPGGSLRLSCAASGFTFSSYAMSWVRQAPGKGLEWVSAISGSGGSTFYADSVKGRFTISRDNSKNTLYLQMNSLRAEDTAVYFCAKHDYSNYPYFDYWGQGTLVTVSS

SEQ ID NO: 759 - protein, 108 aa, Artificial Sequence; identical to SEQ ID NO: 757
  synthetic polypeptide

SEQ ID NO: 760 - protein, 120 aa, Artificial Sequence; identical to SEQ ID NO: 742
  synthetic polypeptide

SEQ ID NO: 761 - protein, 108 aa, Artificial Sequence; identical to SEQ ID NO: 755
  synthetic polypeptide

SEQ ID NO: 762 - protein, 120 aa, Artificial Sequence; identical to SEQ ID NO: 742
  synthetic polypeptide

SEQ ID NO: 763 - protein, 108 aa, Artificial Sequence
  synthetic polypeptide
EIVLTQSPGTLSLSPGERATLSCRASQSVRSSYLAWYQQKPGQAPRLLIYGASSRATGIPDRFSGSGSGTDFTLTISRLEPEDFAVYYCQQYGSSPFTFGPGTKVEIK

SEQ ID NO: 764 - protein, 120 aa, Artificial Sequence
  synthetic polypeptide
EVQLLESGGGLVQPGGSLRLSCAASGFTFSTYAMSWVRQAPGKGLEWVSAISGSGGGTFYADSVKGRFTISRDNSKNTLYLQMNSLRAEDTAVYYCAKHDYSNYPYFDYWGQGTLVTVSS

SEQ ID NO: 765 - protein, 108 aa, Artificial Sequence
  synthetic polypeptide
EIVLTQSPGTLSLSPGERATLSCRASQSIRSNYLAWYQQKPGQAPRLLIYGASSRATGIPDRFSGSGSGTDFTLTISRLEPEDFAVYYCQQYGSSPFTFGPGTKVEIK

SEQ ID NO: 766 - protein, 120 aa, Artificial Sequence; identical to SEQ ID NO: 750
  synthetic polypeptide

SEQ ID NO: 767 - protein, 108 aa, Artificial Sequence
  synthetic polypeptide
EIVLTQSPGTLSLSPGERATLSCRASQSVRSNYLAWYQQKPGQAPRLLIYGASNRATGIPDRFSGSGSGTDFTLTISRLEPEDFAVYSCQQYGISPPTFGGGTKVEIK

SEQ ID NO: 768 - protein, 120 aa, Artificial Sequence
  synthetic polypeptide
EVQLLESGGGLVQPGGSLRLSCAASGFNFASYAMSWVRQAPGKGLEWVSVISGSGGRTHYADSGKGRFTISRDNSKNTLYLQMNSLRAEDTAVYYCAKHDYSNYPYFDYWGQGTLVTVSS

SEQ ID NO: 769 - protein, 108 aa, Artificial Sequence
  synthetic polypeptide
EIVLTQSPGTLSLSPGERATLSCRASQSVRSSYLAWYQQKPGQAPRLLIFGASSRATGIPDRFSGSESGTDFTLTINRLEPEDFAVYYCEQYGNSPPTFGGGTKVEIK

SEQ ID NO: 770 - protein, 120 aa, Artificial Sequence
  synthetic polypeptide
EVQLLESGGGVVQPGRSLRLSCAASGFTFSTYAMSWVRQAPGKGLEWVSLISGSGGRTYYADSVKGRFTISRDNSKNTLYLQMNSLRAEDTAVYYCAKHDYSNYPYFDYWGQGTLVTVSS

SEQ ID NO: 771 - protein, 108 aa, Artificial Sequence
  synthetic polypeptide
EIVLTQSPGTLSLSPGERATLSCRASQSVRSSYLAWYQQKPGQAPRLLIYGASSRATGIPDRFSGSGSGTDFTLTISRLEPEDFAVYYCQQYGSSPPPFGGGTKVEIK

SEQ ID NO: 772 - protein, 120 aa, Artificial Sequence
  synthetic polypeptide
EVQLLESGGGLVQPGGSLRLSCAASGFTFSSYAMSWVRQSPGKGLEWVSAISGSGGRAQYADSVQGRFTVSRDNSKNTLYLQMNSLRAEDTAVYYCAKHDYSNYPYFDYWGQGTLVTVSS

SEQ ID NO: 773 - protein, 107 aa, Artificial Sequence
  synthetic polypeptide
EIVLTQSPATLSVSPGERATLSCRASQSVSSNLAWYQQKPGQAPRLLIYGSSSRATGIPDRFSGSGSGTDFTLTISRLEPEDFAVYYCQQYGSSPPPFGGGTKVEIK

SEQ ID NO: 774 - protein, 120 aa, Artificial Sequence
  synthetic polypeptide
EVQLLESGGGMVQPGGSLRLSCAASGFTFSSYAMSWVRQAPGKGLEWVSAISGSGGRTFYADSVEGRFTISRDNSKNTLYLQMNSLRAEDTAVYYCTKHDYSNYPYFDYWGQGTLVTVSS

SEQ ID NO: 775 - protein, 108 aa, Artificial Sequence
  synthetic polypeptide
EIVLTQSPGTLSLSPGERATLSCRASQGVRSDYLAWYQQKPGQAPRLLIYGASSRATGIPDRFSGSGSGTDFTLTISRLEPEDFAVYHCQQYGSTPPTFGGGTKVEIK

SEQ ID NO: 776 - protein, 120 aa, Artificial Sequence
  synthetic polypeptide
EVQLLESGGGLVQPGGSLRLSCAASGFTFSTYAMSWVRQAPGKGLEWVSTISDSGGSTFYADSVMGRFTISRDNSKNTLYLQMNSLRAEDTAVYYCARHDYSNYAFFDYWGQGTLVTVSS

SEQ ID NO: 777 - protein, 107 aa, Artificial Sequence
  synthetic polypeptide
EIVLTQSPATLSVSPGERATLSCRASQSVSSNLAWYQQKPGQAPRLLIYGASSRATGIPDRFSGSGSGTDFTLTISSLQAEDVAVYYCQQYYSTPFTFGPGTKVEIK

SEQ ID NO: 778 - protein, 120 aa, Artificial Sequence; identical to SEQ ID NO: 776
  synthetic polypeptide

SEQ ID NO: 779 - protein, 107 aa, Artificial Sequence
  synthetic polypeptide
EIVLTQSPATLSVSPGERATLSCRASQSVSSNLAWYQQKPGQAPRLLIYGASTRATGIPARFSGSGSGTEFTLAISRLEPEDFAVYYCQQYYSTPFTFGGGTKVEIK

SEQ ID NO: 780 - protein, 120 aa, Artificial Sequence
  synthetic polypeptide
EVQLLESGGGLVQPGGSLRLSCAASGFTFSTYAMSWVRQAPGKGLDWVSAISGSGGYTYYADSVEGRFTISRDNSRNTLYLQMNSLRAEDTAVYYCASHDYSNYAWFDPWGQGTLVTVSS

SEQ ID NO: 781 - protein, 108 aa, Artificial Sequence
  synthetic polypeptide
EIVLTQSPGTLSLSPGERATLSCRASQSVSSAYLAWYQQKPGQAPRLLIYGASSRATGIPDRFSGSGSGTDFTLTISRLEPEDFAVYYCQQFGSSPFTFGPGTKVEIK

SEQ ID NO: 782 - protein, 120 aa, Artificial Sequence
  synthetic polypeptide
EVQLLESGGGLVQPGGSLRLSCAASGFTFSSYAMSWVRQAPGQGLEWVSAISGSGGRTYYADSVKGRFTISRDNSKNTLYLQMNSLRAEDTAVYYCAKHDYSNYPYFDYWGQGTLVTVSS

SEQ ID NO: 783 - protein, 108 aa, Artificial Sequence
  synthetic polypeptide
EIVLTQSPGTLSLSPGERATLSCRASQSVRGSYLAWYQQKPGQAPRLLIYSASSRATGIPDRFSGSGSGTDFTLTISRLEPEDFAVYYCQQYGDSPFTFGPGTKVEIK

SEQ ID NO: 784 - protein, 120 aa, Artificial Sequence
  synthetic polypeptide
EVQLLESGGGLVQPGGSLRLSCAASGFTFSSYAMSWVRQAPGKGLEWVSAIGDGGGYTYYADSVKGRFTISRDNSKNTLSLLMNSLRAEDTAVYYCARHDYSNYPYFDYWGQGTLVTVSS

SEQ ID NO: 785 - protein, 108 aa, Artificial Sequence
  synthetic polypeptide
EIVLTQSPGTLSLSPGERATLSCRASQGVRSSYFAWYQQKPGQAPRLLIYGASTRATGIPARFSGSGSGTDFTLTISRLEPEDFAVYYCQQYGSSPPTFGQGTKVEIK

SEQ ID NO: 786 - protein, 120 aa, Artificial Sequence
  synthetic polypeptide
EVQLLESGGGVVQPGRSLRLSCAASGFTFSSYAMSWVRQAPGKGLEWVSAISGSGGRTFYADSVEGRFTISRDNSKNTLYLQMNSLRAEDTAVYYCAKHDYSNYPYFDYWGQGTLVTVSS

SEQ ID NO: 787 - protein, 108 aa, Artificial Sequence
  synthetic polypeptide
EIVLTQSPGTLSLSPGERATLSCRASQSIRSNYLAWYQQKPGQAPRLLIYGASSRATGIPDRFSGSGSGTDFTLTISRLEPEDFAVYYCQQYGSSPPSFGQGTKVEIK

SEQ ID NO: 788 - protein, 120 aa, Artificial Sequence
  synthetic polypeptide
EVQLLESGGGVVQPGRSLRLSCAASGFTFSSYAMSWVRQAPGKGLEWVSAISGSGGGTFYADSVEGRFTISRDNSKNTLYLQMNSLRAEDTAVYYCARHDYSNYPYFDYWGLGTLVTVSS

SEQ ID NO: 789 - protein, 108 aa, Artificial Sequence
  synthetic polypeptide
EIVLTQSPGTLSLSPGERATLSCRASQSVRSSYLAWYQQKPGQAPRLLIYGASSRATGIPDRFSGSGSGTDFTLTISRLEPEDFAVYSCQQYGDLPFTFGPGTKVEIK

SEQ ID NO: 790 - protein, 120 aa, Artificial Sequence; identical to SEQ ID NO: 742
  synthetic polypeptide

SEQ ID NO: 791 - protein, 108 aa, Artificial Sequence
  synthetic polypeptide
EIVLTQSPGTLSLSPGERATLSCRASQSIRSSYLAWYQQKPGQAPRLLIYGASSRATGIPDRFSGSGSGTDFTLTISRLEPEDFAVYYCQQYGDLPFTFGPGTKVDIK

SEQ ID NO: 792 - protein, 120 aa, Artificial Sequence; identical to SEQ ID NO: 774
  synthetic polypeptide

SEQ ID NO: 793 - protein, 108 aa, Artificial Sequence
  synthetic polypeptide
EIVLTQSPGTLSLSPGERATLSCRASQSVRSSYLAWYQQKPGQAPRLLIYGASSRATGIPDRFSGSGSGTDFTLTISRLEPEDFAVYYCQQYGDLPFTFGPGTKVDIK

SEQ ID NO: 794 - protein, 120 aa, Artificial Sequence; identical to SEQ ID NO: 750
  synthetic polypeptide

SEQ ID NO: 795 - protein, 108 aa, Artificial Sequence
  synthetic polypeptide
EIVLTQSPGTLSLSPGERATLSCRASQGVRSSYLAWYQQKPGQAPRLLIYGASSRATGIPDRFSGSGSGTDFTLTINRLEPEDFAVYYCQQYGSSPPTFGGGTKVDIK

SEQ ID NO: 796 - protein, 120 aa, Artificial Sequence; identical to SEQ ID NO: 786
  synthetic polypeptide

SEQ ID NO: 797 - protein, 108 aa, Artificial Sequence
  synthetic polypeptide
EIVLTQSPGTLSLSPGERATLSCRASQSVRSNYLAWYQQKPGQAPRLLIYGASSRATGIPDRFSGSGSGTDFTLTINRLEPEDFAVYYCQQYGSSPPTFGGGTKVDIK

SEQ ID NO: 798 - protein, 120 aa, Artificial Sequence
  synthetic polypeptide
EVQLLESGGGLVQPGGSLRLSCAASGFTFSSYAMSWVRQAPGKGLEWVSVISDSGGITDFADSVKGRFIISRDNSRNTLYLQMNSLRAEDTAVYFCARHDYSNYFFFDYWGQGTLVTVSS

SEQ ID NO: 799 - protein, 107 aa, Artificial Sequence
  synthetic polypeptide
DIQMTQSPSSLSASVGDRVTITCRASQDISNYLNWYQQKSGKAPELLIYAASSLQSGVPSRFSGSGSGTDFTLTISSLQPEDFATYYCQQSYISPPTFGQGTKVEIK

SEQ ID NO: 800 - protein, 120 aa, Artificial Sequence
  synthetic polypeptide
EVQLLESGGGVVQPGRSLRLSCAASGFTFSSYAMSWVRQAPGKGLEWVSVISDSGGITDFADSVKGRFTISRDNSRNTLYLQMNSLRAEDTAVYFCARHDYSNYFFFDYWGQGTLVTVSS

SEQ ID NO: 801 - protein, 107 aa, Artificial Sequence
  synthetic polypeptide
DIQMTQSPSSLSASVGDRVTITCRASQSISSYLNWYQQKPGKAPKLLIYAASSLQSGVPSRFSGSGSGTDFTLTISSLQPEDFATYYCQQSYISPPTFGQGTKVEIK

SEQ ID NO: 802 - protein, 120 aa, Artificial Sequence
  synthetic polypeptide
EVQLLESGGGLVQPGGSLRLSCAASGFTFSSYAMSWVRQVPGKGLEWVSVISGSGGRTDYADSVKGRFTISRDNSKNTLYLQMNSLRAEDTAVYYCARHDYSNRFYFDYWGQGTLVTVSS

SEQ ID NO: 803 - protein, 107 aa, Artificial Sequence
  synthetic polypeptide
DIQMTQSPSSLSASVGDRVSITCRASQSISSYLNWYQQKPGKAPKLLIYAASSLQSGVPSRFSGSGSGTDFTLTISSLQPEDFATYYCQQSYSAPPTFGGGTKVEIK

SEQ ID NO: 804 - protein, 120 aa, Artificial Sequence
  synthetic polypeptide
EVQLLESGGGLVQPGGSLRLSCAASGFTFSSYAMSWVRQAPGKGLEWVSVISDSGGITDYADSVKGRFTISRDNSKNTLYLQMNSLRAEDRAVYYCARHDYSNRYYFDYWGQGTLVTVSS

SEQ ID NO: 805 - protein, 107 aa, Artificial Sequence [sequence omitted]

SEQ ID NO: 806 - protein, 120 aa, Artificial Sequence
  synthetic polypeptide
EVQLLESGGGLVQPGGSLRLSCAASGFTFSSYAMSWVRQAPGKGLEWVSVISDSGGITDFADSVKGRFTISRDNSRNTLYLQMNSLRAEDTAVYFCARHDYSNYFFFDYWGQGTLVTVSS

SEQ ID NO: 807 - protein, 107 aa, Artificial Sequence
  synthetic polypeptide
DIQMTQSPSSLSASVGDRVTITCRASQGISNYLAWYQQKPGKVPKLLIYAASILQSGVPSKFSGSGSGTDFTLTISSLQPEDFAIYYCQQYFAYPITFGQGTRLEIK

SEQ ID NO: 808 - protein, 120 aa, Artificial Sequence
  synthetic polypeptide
EVQLLESGGGLVQPGGSLRLSCAASGFTFSSYAMSWVRQAPGKGLEWVSVISDSGGITDFADSVKGRSTISRDNSRNTLYLQMNSLRAEDTAVYFCARHDYSNYFFFDYWGQGTLVTVSS

SEQ ID NO: 809 - protein, 107 aa, Artificial Sequence
  synthetic polypeptide
DIQMTQSPSSVSASVGDRVTITCRASQSISSYLNWYQQKPGKAPKLLIYAASSLQSGVPSRFSGSGSGTDFTLTISSLQPEDFATYYCQQSYSTPITFGQGTRLEIK

SEQ ID NO: 810 - protein, 120 aa, Artificial Sequence; identical to SEQ ID NO: 780
  synthetic polypeptide

SEQ ID NO: 811 - protein, 107 aa, Artificial Sequence
  synthetic polypeptide
DIQMTQSPSSLSASVGDRVTITCRASQSISSYLNWYQQKPGKAPKLLIYAASSLQSGVPSRFSGSGSGTDFTLTISSLQPEDFATYYCQQSYSTPFTFGPGTRLEIK

SEQ ID NO: 812 - protein, 118 aa, Artificial Sequence
  synthetic polypeptide
QVQLQESGPGLVKPSETLSLTCTVSGGSVSTDGYYWSWIRQPPGKGLEWIGYIYYSGSTNYNPSLKSRVTISVDTSKNQFSLKLSSVTAADTAVYYCARGIGLGFEYWGQGTLVTVSS

SEQ ID NO: 813 - protein, 109 aa, Artificial Sequence
  synthetic polypeptide
SYVLTQLTSVSVAPGQTARITCGGNNIGSKSVHWYQQKPGQAPVLVVYDDSDRPSGIPERFSGSNSGNTATLTISRVEAGDEADFYCQVWDRSSDQDVVFGGGTKLTVL

SEQ ID NO: 814 - protein, 118 aa, Artificial Sequence; identical to SEQ ID NO: 812
  synthetic polypeptide

SEQ ID NO: 815 - protein, 109 aa, Artificial Sequence
  synthetic polypeptide
SYVLTQLSSVSVAPGQTARITCGGNNIGSKSVHWYQQKPGQAPVLVVYDDSDRPSGIPERFSGSNSGNTATLTISRVEAGDEADYYCQVWDRSSDQDVVFGGGTKLTVL

SEQ ID NO: 816 - protein, 120 aa, Artificial Sequence; identical to SEQ ID NO: 742
  synthetic polypeptide

SEQ ID NO: 817 - protein, 108 aa, Artificial Sequence
  synthetic polypeptide
EIVLTQSPGTLSLSPGERATLSCRASQSVRSSYLAWYQQKPGQAPRLLIYGASSRATGIPDRFSGSGSGTDFTLTISRLEPEDFAVYFCQQYGSSPPTFGGGTRLEIK

SEQ ID NO: 818 - protein, 120 aa, Artificial Sequence
  synthetic polypeptide
EVQLLESGGGLVQPGGSLRLSCAASGFTFSIYAMSWVRQAPGKGLEWVSAIGDSGGSTFYADSVKGRFTISRDNSKNTLYLQMNSLRAEDTAVYYCAKHDYSNYPYFDYWGQGTLVTVSS

SEQ ID NO: 819 - protein, 108 aa, Artificial Sequence
  synthetic polypeptide
EIVLTQSPGTLSLSPGERATLSCRASQSVRSSYVAWYQQKPGQAPRLLIYGASSRATGIPDRFSGSGSGTDFTLTISRLEPEDFAVYYCQQYGDLPFTFGPGTRLEIK

SEQ ID NO: 820 - protein, 124 aa, Artificial Sequence
  synthetic polypeptide
QVQLVESGGGVVQPGRSLRLSCAASGFMFSSYGMHWVRQAPGKGLEWVAVISYDGSNKYYADSVKGRFTISRDNSKNTLYLQMNSLRAEDTAVYYCARGRYYGSGNYNHGMDVWGQGTTVTVSS

SEQ ID NO: 821 - protein, 107 aa, Artificial Sequence
  synthetic polypeptide
DIQMTQSPSSLSASVGDRVTITCRASQSISSYLNWYQQKPGKAPKLLIYAASSLQSGVPSRFSGRGSGTDFTLTISSLQPEDFATYYCQQSYSTPFTFGPGTKVEIK

SEQ ID NO: 822 - protein, 124 aa, Artificial Sequence
  synthetic polypeptide
QVQLVESGGGVVQPGRSLRLSCAASGFTFSSYGMHWVRQAPGKGLEWVAVISYDGSNKYYADSVKGRFTISRDNSKNTLYLQMNSLRAEDTAVYYCARGRYYGSGSYNYGMDVWGQGTTVTVSS

SEQ ID NO: 823 - protein, 107 aa, Artificial Sequence
  synthetic polypeptide
DIQMTQSPSSLSASVGDRVTITCRASQSIFDYLNWYQQKPGKAPKLLIYAASSLQSGVPSRFSGSGFGTDFTLTISSLQPEDFATYYCQQSYSTPLTFGGGTKLEIK

SEQ ID NO: 824 - protein, 120 aa, Artificial Sequence
  synthetic polypeptide
QVQLVESGGGVVQPGRSLRLSCAASGFTFSSYGMHWVRQAPGKGLEWVAVIWYDGSSEYYADSVKGRFTISRDNSKNTLYLQMNSLRAEDTAVYYCARDNSYNYYGMDVWGQGTTVTVSS

SEQ ID NO: 825 - protein, 111 aa, Artificial Sequence
  synthetic polypeptide
QSVLTQPPSVSGAPGQRVTISCTGSSSNIGAAYDVHWYQQFPGTAPKLLIYVNSHRPPGVPDRFSGSKSGTSASLAITGLQAEDEADYYCLSYDNSLSGSVFGGGTKLTVL

SEQ ID NO: 826 - protein, 125 aa, Artificial Sequence
  synthetic polypeptide
QVQLQESGPGLVKPSQTLSLTCTVSGGSISSSSYYWGWIRQPPGKGLEWIGSIYHSGGTYFNPSLKSRVTISVDTSKNQFSLKLSSVTAADTAVYYCARHYEILTGYYPDVFDIWGQGTMVTVSS

SEQ ID NO: 827 - protein, 107 aa, Artificial Sequence
  synthetic polypeptide
DIQMTQSPSSLSASVGDRVTITCRASQSISSYLNWYQQKPGKAPKLLIYAASNLQSGVSSRFSGSGSGTDFTLTISSLQPEDFATYYCQQSFSSPRTFGQGTKVEIK

SEQ ID NO: 828 - protein, 118 aa, Artificial Sequence
  synthetic polypeptide
QVQLQQWGAGLLKPSETLSLTCAVYDGSVSGFYWSWIRQPPGKGLEWIGEIDHSGSTNYNPSLKSRVTISVDTSKNQFSLKLSSVTAADSAVYYCARNGYSGYLFDYWGQGTLVTVSS

SEQ ID NO: 829 - protein, 107 aa, Artificial Sequence
  synthetic polypeptide
DIQMTQSPSSLSASVGDRVTITCRASQIISSYLNWYQQKPGKAPKVLIYGASSMQSGVPSRFSGSGYGTDFTLTISSLQPEDFATYYCQQSYSIPRTFGQGTKLEIK

SEQ ID NO: 830 - protein, 125 aa, Artificial Sequence
  synthetic polypeptide
QVQLQESGPGLVKPSETLSLTCTVSGDSISTYYWSWIRQPAGKGLEWIGRIYPTGITNYNPSLKSRVTISVDTSKNQFSLKLSSVTAADTAVYYCARDRRFLEPSYYYYYGMDVWGQGTTVTVSS

SEQ ID NO: 831 - protein, 112 aa, Artificial Sequence
  synthetic polypeptide
DIVLTQSPLSLPVTPGEPASISCRSSQSLLHSNGYNYLDWYLQKPGQSPQLLIYLGSNRASGVPDRFSGSVSGTDFTLKISRVEAEDVGVYYCMQGLRTPFTFGPGTKLEIK

SEQ ID NO: 832 - protein, 120 aa, Artificial Sequence; identical to SEQ ID NO: 806
  synthetic polypeptide

SEQ ID NO: 833 - protein, 107 aa, Artificial Sequence
  synthetic polypeptide
DIQMTQSPSSLSASVGDRITITCRASQSISNYLNWYQQKPGKAPKLLISAASSLQSGVPSRFSGSGSGTDFTLTISSLQPEDFATYYCQQSYIIPPTFGQGTKVDIK

SEQ ID NO: 834 - protein, 120 aa, Artificial Sequence
  synthetic polypeptide
EVQLVESGGGLVKPGGSLRLSCAASGFTFSSYSMNWVRQAPGKGLEWVSYISSSGGYIYYADSVKGRFTISRDNAKNSLYLQMNSLRAEDAAVYYCSRGDYSNYAYFDYWGQGTLVTVSS

SEQ ID NO: 835 - protein, 107 aa, Artificial Sequence
  synthetic polypeptide
DIQMTQSPSSLSASVGDRVTITCRASQGISNYLAWYQQKPGKVPKLLIYAASTLQSGVPSRFSGSGSGTDFTLTISSLQAEDVAVYYCQQYYSTPLTFGGGTKVEIK

SEQ ID NO: 836 - protein, 120 aa, Artificial Sequence
  synthetic polypeptide
EVQLVESGGGLVKPGGSLRLSCAASGITFSTYTMNWVRQAPGKGLEWVSSISSSSGYIYYADSVKGRFTISRDNAKNSLYLQMNSLRAEDTAVYYCARGDYSNYLYFDLWGRGTLVTVSS

SEQ ID NO: 837 - protein, 108 aa, Artificial Sequence
  synthetic polypeptide
EIVLTQSPGTLSLSPGERATLSCRASQSFRSSYLAWYQQKPGQAPRLLIHGASSRATGIPDRFSGSGSGTDFTLTISRLEPEDFAVYYCQLYGSLPITFGQGTRLEIK

SEQ ID NO: 838 - protein, 120 aa, Artificial Sequence
  synthetic polypeptide
EVQLLESGGGLVQPGGSLRLSCAASGFTFSVYAMSWVRQAPGKCLEWVSTISDSGGSTFYADSVKGRFTISRDNSKNTLYLQMNRLRAEDTAVYYCARHDYSNYAYFDYWGQGTLVTVSS

SEQ ID NO: 839 - protein, 108 aa, Artificial Sequence
  synthetic polypeptide
EIVLTQSPGTLSLSPGERATLSCRASQSVRSSYLAWYQQKPGQAPRLLIYGASSRATGIPDRFSGSGSGTDFTLTISRLEPEDFAVYYCQQYGDLPFTFGCGTKVEIK

SEQ ID NO: 840 - protein, 120 aa, Artificial Sequence
  synthetic polypeptide
EVQLLESGGGLVQPGGSLRLSCAASGFTFSTYAMSWVRQAPGKCLDWVSAISGSGGYTYYADSVEGRFTISRDNSRNTLYLQMNSLRAEDTAVYYCASHDYSNYAWFDPWGQGTLVTVSS

SEQ ID NO: 841 - protein, 108 aa, Artificial Sequence
  synthetic polypeptide
EIVLTQSPGTLSLSPGERATLSCRASQSVSSAYLAWYQQKPGQAPRLLIYGASSRATGIPDRFSGSGSGTDFTLTISRLEPEDFAVYYCQQFGSSPFTFGCGTKVEIK

SEQ ID NO: 842 - protein, 120 aa, Artificial Sequence
  synthetic polypeptide
EVQLLESGGGLVQPGGSLRLSCAASGFTFSSYAMSWVRQAPGQCLEWVSAISGSGGRTYYADSVKGRFTISRDNSKNTLYLQMNSLRAEDTAVYYCAKHDYSNYPYFDYWGQGTLVTVSS

SEQ ID NO: 843 - protein, 108 aa, Artificial Sequence
  synthetic polypeptide
EIVLTQSPGTLSLSPGERATLSCRASQSVRGSYLAWYQQKPGQAPRLLIYSASSRATGIPDRFSGSGSGTDFTLTISRLEPEDFAVYYCQQYGDSPFTFGCGTKVEIK

SEQ ID NO: 844 - protein, 120 aa, Artificial Sequence
  synthetic polypeptide
EVQLLESGGGLVQPGGSLRLSCAASGFTFSSYAMSWVRQAPGKCLEWVSVISDSGGITDFADSVKGRFIISRDNSRNTLYLQMNSLRAEDTAVYFCARHDYSNYFFFDYWGQGTLVTVSS

SEQ ID NO: 845 - protein, 107 aa, Artificial Sequence
  synthetic polypeptide
DIQMTQSPSSLSASVGDRVTITCRASQDISNYLNWYQQKSGKAPELLIYAASSLQSGVPSRFSGSGSGTDFTLTISSLQPEDFATYYCQQSYISPPTFGCGTKVEIK

SEQ ID NO: 846 - protein, 120 aa, Artificial Sequence
  synthetic polypeptide
EVQLLESGGGLVQPGGSLRLSCAASGFTFSSYAMSWVRQAPGKCLEWVSVISDSGGITDFADSVKGRFTISRDNSRNTLYLQMNSLRAEDTAVYFCARHDYSNYFFFDYWGQGTLVTVSS

SEQ ID NO: 847 - protein, 107 aa, Artificial Sequence
  synthetic polypeptide
DIQMTQSPSSLSASVGDRVTITCRASQGISNYLAWYQQKPGKVPKLLIYAASILQSGVPSKFSGSGSGTDFTLTISSLQPEDFAIYYCQQYFAYPITFGCGTRLEIK

SEQ ID NO: 848 - protein, 118 aa, Artificial Sequence
  synthetic polypeptide
QVQLQESGPGLVKPSETLSLTCTVSGGSVSTDGYYWSWIRQPPGKCLEWIGYIYYSGSTNYNPSLKSRVTISVDTSKNQFSLKLISVTAADTAVYYCARGIGLGFEYWGQGTLVTVSS

SEQ ID NO: 849 - protein, 109 aa, Artificial Sequence
  synthetic polypeptide
SYVLTQLSSVSVAPGQTARITCGGNNIGSKSVHWYQQKPGQAPVLVVYDDSDRPSGIPERFSGSNSGNTATLTISRVEAGDEADYYCQVWDRSSDQDVVFGCGTKLTVL

SEQ ID NO: 850 - protein, 124 aa, Artificial Sequence
  synthetic polypeptide
QVQLVESGGGVVQPGRSLRLSCAASGFMFSSYGMHWVRQAPGKCLEWVAVISYDGSNKYYADSVKGRFTISRDNSKNTLYLQMNSLRAEDTAVYYCARGRYYGSGNYNHGMDVWGQGTTVTVSS

SEQ ID NO: 851 - protein, 107 aa, Artificial Sequence
  synthetic polypeptide
DIQMTQSPSSLSASVGDRVTITCRASQSISSYLNWYQQKPGKAPKLLIYAASSLQSGVPSRFSGRGSGTDFTLTISSLQPEDFATYYCQQSYSTPFTFGCGTKVEIK

SEQ ID NO: 852 - protein, 124 aa, Artificial Sequence
  synthetic polypeptide
QVQLVESGGGVVQPGRSLRLSCAASGFTFSSYGMHWVRQAPGKCLEWVAVISYDGSNKYYADSVKGRFTISRDNSKNTLYLQMNSLRAEDTAVYYCARGRYYGSGSYNYGMDVWGQGTTVTVSS

SEQ ID NO: 853 - protein, 107 aa, Artificial Sequence
  synthetic polypeptide
DIQMTQSPSSLSASVGDRVTITCRASQSIFDYLNWYQQKPGKAPKLLIYAASSLQSGVPSRFSGSGFGTDFTLTISSLQPEDFATYYCQQSYSTPLTFGCGTKLEIK

SEQ ID NO: 854 - protein, 125 aa, Artificial Sequence
  synthetic polypeptide
QVQLQESGPGLVKPSETLSLTCTVSGDSISTYYWSWIRQPAGKCLEWIGRIYPTGITNYNPSLKSRVTISVDTSKNQFSLKLSSVTAADTAVYYCARDRRFLEPSYYYYYGMDVWGQGTTVTVSS

SEQ ID NO: 855 - protein, 112 aa, Artificial Sequence
  synthetic polypeptide
DIVLTQSPLSLPVTPGEPASISCRSSQSLLHSNGYNYLDWYLQKPGQSPQLLIYLGSNRASGVPDRFSGSVSGTDFTLKISRVEAEDVGVYYCMQGLRTPFTFGCGTKLEIK

SEQ ID NO: 856 - protein, 120 aa, Artificial Sequence
  synthetic polypeptide
EVQLVESGGGLVKPGGSLRLSCAASGFTFSSYSMNWVRQAPGKCLEWVSYISSSGGYIYYADSVKGRFTISRDNAKNSLYLQMNSLRAEDAAVYYCSRGDYSNYAYFDYWGQGTLVTVSS

SEQ ID NO: 857 - protein, 107 aa, Artificial Sequence
  synthetic polypeptide
DIQMTQSPSSLSASVGDRVTITCRASQGISNYLAWYQQKPGKVPKLLIYAASTLQSGVPSRFSGSGSGTDFTLTISSLQAEDVAVYYCQQYYSTPLTFGCGTKVEIK

SEQ ID NO: 858 - protein, 120 aa, Artificial Sequence
  synthetic polypeptide
EVQLLESGGGLVQPGGSLRLSCAASGFTFSSYAMSWVRQAPGKGLEWVSAISGSGGSTFYADSVQGRFTISRDNSKNTLYLQVNSLRAEDTAVYYCARHDYSNYPYFDYWGQGTLVTVSS

SEQ ID NO: 859 - protein, 108 aa, Artificial Sequence
  synthetic polypeptide
EIVLTQSPGTLSLSPGERATLSCRASQSVRGNYLAWYQQKPGQAPRLLIYGASSRATGIPDRFSGSGSGTDFTLTISRLEPEDFAVYYCQQYGYSPFTFGPGTKVDIK

SEQ ID NO: 860 - protein, 120 aa, Artificial Sequence
  synthetic polypeptide
EVQLLESGGGLVQPGGSLRLSCAASGFTFSSYAMSWVRQAPGKCLEWVSVISGSGGRPNYAESVKGRFTISRDNSKNTLYLQMNSLRDEDTAVYYCAKVDYSNYLFFDYWGQGTLVTVSS

SEQ ID NO: 861 - protein, 108 aa, Artificial Sequence
  synthetic polypeptide
EIVLTQSPGTLSLSPGEGATLSCRAGQSVRSSYLGWYQQKPGQAPRLLIYGASSRATGIPDRFSGSGSGTDFTLTISRLEPEDFAVYYCQQYGYSPPTFGCGTKLEIK

SEQ ID NO: 862 - protein, 120 aa, Artificial Sequence
  synthetic polypeptide
EVQLLESGGGLVQPGGSLKLSCAASGFTFSIYAMSWVRQAPGKCLEWVSAISGSGGSTFYAESVKGRFTISRDNSKNTLYLQMNSLRAEDTAVYYCAKHDYSNYPYFDYWGQGTLVTVSS

SEQ ID NO: 863 - protein, 108 aa, Artificial Sequence
  synthetic polypeptide
EIVLTQSPGTLSLSPGERATLSCRASQSVRSSYLAWYQQKPGQAPRLLIYGASSRATGIPDRFSGSGSGTDFTLTISRLEPEDFAVYYCQQYGDLPFTFGCGTKLEIK

SEQ ID NO: 864 - protein, 120 aa, Artificial Sequence
  synthetic polypeptide
EVQLLESGGGMVQPGGSLRLSCAASGFTFSSYAMSWVRQAPGKCLEWVSAISGSGGRTFYAESVEGRFTISRDNSKNTLFLQMNSLRAEDTAVYYCAKHDYSNYPYFDYWGQGTLVTVSS

SEQ ID NO: 865 - protein, 108 aa, Artificial Sequence
  synthetic polypeptide
EIVLTQSPGTLSLSPGERATLSCRASQSVRSSYLAWYQQKPGQAPRLLIYGASSRATGIPDRFSGSGSGTDFTLTISRLEPEDFAVYYCQQYGSSPFTFGCGTKLEIK

SEQ ID NO: 866 - protein, 120 aa, Artificial Sequence
  synthetic polypeptide
EVQLLESGGGMVQPGGSLRLSCAASGFTFSSYAMSWVRQAPGKCLEWVSAISGSGGRTFYAESVEGRFTISRDNSKNTLYLQMNSLRAEDTAVYYCAKHDYSNYPYFDYWGQGTLVTVSS

SEQ ID NO: 867 - protein, 108 aa, Artificial Sequence
  synthetic polypeptide
EIVLTQSPGTLSLSPGERATLSCRASQSIRSSYLAWYQQKPGQAPRLLIYGASSRATGIPDRFSGSGSGTDFTLTISRLEPEDFAVYYCQQYGDLPFTFGCGTKLEIK

SEQ ID NO: 868 - protein, 120 aa, Artificial Sequence
  synthetic polypeptide
EVQLLESGGGLVQSGGSLRLSCAASGFTFSSYAMSWVRQAPGKCLEWVSAISGSGGRTHYAESVKGRFTISRDNSKNTLYLQMNSLRAEDTAVYYCAKHDYSNYPYFDYWGQGTLVTVSS

SEQ ID NO: 869 - protein, 108 aa, Artificial Sequence; identical to SEQ ID NO: 865
  synthetic polypeptide

SEQ ID NO: 870 - protein, 120 aa, Artificial Sequence
  synthetic polypeptide
EVQLLESGGGLVQPGGSLRLSCAASGFTFSSYAMSWVRQAPGKCLEWVSLISGSGGRTHYAESVKGRFTISRDNSKNTLYLQMNSLRAEDTAVYYCAKHDYSNYPYFDYWGQGTLVTVSS

SEQ ID NO: 871 - protein, 108 aa, Artificial Sequence
  synthetic polypeptide
EIVLTQSPGTLSLSPGERATLSCRASQSVRSTYLAWYQQKPGQAPRLLIYDASSRATGIPDRFSGSGSGTDFTLTISRLEPEDFAVYFCQQYGSSPPTFGCGTKLEIK

SEQ ID NO: 872 - protein, 120 aa, Artificial Sequence
  synthetic polypeptide
EVQLLESGGGLVQPGGSLRLSCAASGFTFSTYAMSWVRQAPGKCLEWVSAISGSGGSTFYAESVKGRFTISRDNSKNTLSLQMNSLRAEDTAVYYCAKHDYSNYPYFDYWGQGTLVTVSS

SEQ ID NO: 873 - protein, 108 aa, Artificial Sequence; identical to SEQ ID NO: 863
  synthetic polypeptide

SEQ ID NO: 874 - protein, 120 aa, Artificial Sequence
  synthetic polypeptide
EVQLLESGGGMVQPGGSLRLSCAASGFTFSTYAMSWVRQAPGKCLEWVSAISGSGGRTFYAESVEGRFTISRDNSKNTLYLQMNSLRAEDTAVYYCAKHDYSNYPYFDYWGQGTLVTVSS

SEQ ID NO: 875 - protein, 108 aa, Artificial Sequence
  synthetic polypeptide
EIVLTQSPGTLSLSPGERATLSCRASQSVRSTYLAWYQQKPGQAPRLLIYGASSRATGIPDRFSGSGSGTDFTLTISRLEPEDFAVYSCQQYGDLPFTFGCGTKLEIK

SEQ ID NO: 876 - protein, 120 aa, Artificial Sequence
  synthetic polypeptide
EVQLLESGGGLVQPGGSLRLSCAASGFTFSSYAMSWVRQAPGKCLEWVSAISGSGGYTYYAESVKGRFTISRDNSKNTLYLQMNSLRAEDTAVYYCAKHDYSNYPYFDYWGQGTLVTVSS

SEQ ID NO: 877 - protein, 108 aa, Artificial Sequence
  synthetic polypeptide
EIVLTQSPGTLSLSPGERATLSCRASQSVRSNYLAWYQQKPGQAPRLLIYGASSRATGIPDRFSGSGSGTDFTLTISRLEPEDFAVYYCQQYGDLPFTFGCGTKVEIK

SEQ ID NO: 878 - protein, 120 aa, Artificial Sequence
  synthetic polypeptide
EVQLLESGGGLAQPGGSLRLSCAASGFTFSSYAMSWVRQAPGKCLEWVSAISGSGGSTFYAESVKGRFTISRDNSKNTLYLQMNSLRAEDTAVYFCAKHDYSNYPYFDYWGQGTLVTVSS

SEQ ID NO: 879 - protein, 108 aa, Artificial Sequence; identical to SEQ ID NO: 839
  synthetic polypeptide

SEQ ID NO: 880 - protein, 120 aa, Artificial Sequence; identical to SEQ ID NO: 866
  synthetic polypeptide

SEQ ID NO: 881 - protein, 108 aa, Artificial Sequence; identical to SEQ ID NO: 877
  synthetic polypeptide

SEQ ID NO: 882 - protein, 120 aa, Artificial Sequence; identical to SEQ ID NO: 866
  synthetic polypeptide

SEQ ID NO: 883 - protein, 108 aa, Artificial Sequence
  synthetic polypeptide
EIVLTQSPGTLSLSPGERATLSCRASQSVRSSYLAWYQQKPGQAPRLLIYGASSRATGIPDRFSGSGSGTDFTLTISRLEPEDFAVYYCQQYGSSPFTFGCGTKVEIK

SEQ ID NO: 884 - protein, 120 aa, Artificial Sequence
  synthetic polypeptide
EVQLLESGGGLVQPGGSLRLSCAASGFTFSSYAMSWVRQAPGKCLEWVSAISGSGGSTFYAESVQGRFTISRDNSKNTLYLQVNSLRAEDTAVYYCARHDYSNYPYFDYWGQGTLVTVSS

SEQ ID NO: 885 - protein, 108 aa, Artificial Sequence
  synthetic polypeptide
EIVLTQSPGTLSLSPGERATLSCRASQSVRGNYLAWYQQKPGQAPRLLIYGASSRATGIPDRFSGSGSGTDFTLTISRLEPEDFAVYYCQQYGYSPFTFGCGTKVEIK

SEQ ID NO: 886 - protein, 120 aa, Artificial Sequence
  synthetic polypeptide
EVQLLESGGGLVQPGGSLRLSCAASGFTFSTYAMSWVRQAPGKCLEWVSAISGSGGGTFYAESVKGRFTISRDNSKNTLYLQMNSLRAEDTAVYYCAKHDYSNYPYFDYWGQGTLVTVSS

SEQ ID NO: 887 - protein, 108 aa, Artificial Sequence
  synthetic polypeptide
EIVLTQSPGTLSLSPGERATLSCRASQSIRSNYLAWYQQKPGQAPRLLIYGASSRATGIPDRFSGSGSGTDFTLTISRLEPEDFAVYYCQQYGSSPFTFGCGTKVEIK

SEQ ID NO: 888 - protein, 120 aa, Artificial Sequence
  synthetic polypeptide
EVQLLESGGGLVQPGGSLRLSCAASGFTFSTYAMSWVRQAPGKCLEWVSLISGSGGRTYYAESVKGRFTISRDNSKNTLYLQMNSLRAEDTAVYYCAKHDYSNYPYFDYWGQGTLVTVSS

SEQ ID NO: 889 - protein, 108 aa, Artificial Sequence
  synthetic polypeptide
EIVLTQSPGTLSLSPGERATLSCRASQSVRSNYLAWYQQKPGQAPRLLIYGASNRATGIPDRFSGSGSGTDFTLTISRLEPEDFAVYSCQQYGISPPTFGCGTKVEIK

SEQ ID NO: 890 - protein, 120 aa, Artificial Sequence
  synthetic polypeptide
EVQLLESGGGLVQPGGSLRLSCAASGFTFSSYAMSWVRQSPGKCLEWVSAISGSGGRAQYAESVQGRFTVSRDNSKNTLYLQMNSLRAEDTAVYYCAKHDYSNYPYFDYWGQGTLVTVSS

SEQ ID NO: 891 - protein, 107 aa, Artificial Sequence
  synthetic polypeptide
EIVLTQSPATLSVSPGERATLSCRASQSVSSNLAWYQQKPGQAPRLLIYGSSSRATGIPDRFSGSGSGTDFTLTISRLEPEDFAVYYCQQYGSSPPPFGCGTKVEIK

SEQ ID NO: 892 - protein, 120 aa, Artificial Sequence
  synthetic polypeptide
EVQLLESGGGMVQPGGSLRLSCAASGFTFSSYAMSWVRQAPGKCLEWVSAISGSGGRTFYAESVEGRFTISRDNSKNTLYLQMNSLRAEDTAVYYCTKHDYSNYPYFDYWGQGTLVTVSS

SEQ ID NO: 893 - protein, 108 aa, Artificial Sequence
  synthetic polypeptide
EIVLTQSPGTLSLSPGERATLSCRASQGVRSDYLAWYQQKPGQAPRLLIYGASSRATGIPDRFSGSGSGTDFTLTISRLEPEDFAVYHCQQYGSTPPTFGCGTKVEIK

SEQ ID NO: 894 - protein, 119 aa, Artificial Sequence
  synthetic polypeptide
EVQLLESGGGLVQPGGSLRLSCAASGFTFSSYAMSWVRQAPGKCLEWVSAIGEGGGYTYYAESVKGRFTISRDNSKNTLSLLMNSLRAEDTAVYYCARHDYSNYPYFDYWGQGTLVTVS

SEQ ID NO: 895 - protein, 108 aa, Artificial Sequence
  synthetic polypeptide
EIVLTQSPGTLSLSPGERATLSCRASQGVRSSYFAWYQQKPGQAPRLLIYGASTRATGIPARFSGSGSGTDFTLTISRLEPEDFAVYYCQQYGSSPPTFGCGTKVEIK

SEQ ID NO: 896 - protein, 120 aa, Artificial Sequence
  synthetic polypeptide
EVQLLESGGGVVQPGRSLRLSCAASGFTFSSYAMSWVRQAPGKCLEWVSAISGSGGRTFYAESVEGRFTISRDNSKNTLYLQMNSLRAEDTAVYYCAKHDYSNYPYFDYWGQGTLVTVSS

SEQ ID NO: 897 - protein, 108 aa, Artificial Sequence
  synthetic polypeptide
EIVLTQSPGTLSLSPGERATLSCRASQSIRSNYLAWYQQKPGQAPRLLIYGASSRATGIPDRFSGSGSGTDFTLTISRLEPEDFAVYYCQQYGSSPPSFGCGTKVEIK

SEQ ID NO: 898 - protein, 120 aa, Artificial Sequence
  synthetic polypeptide
EVQLLESGGGVVQPGRSLRLSCAASGFTFSSYAMSWVRQAPGKCLEWVSAISGSGGGTFYAESVEGRFTISRDNSKNTLYLQMNSLRAEDTAVYYCARHDYSNYPYFDYWGLGTLVTVSS

SEQ ID NO: 899 - protein, 108 aa, Artificial Sequence
  synthetic polypeptide
EIVLTQSPGTLSLSPGERATLSCRASQSVRSSYLAWYQQKPGQAPRLLIYGASSRATGIPDRFSGSGSGTDFTLTISRLEPEDFAVYSCQQYGDLPFTFGCGTKVEIK

SEQ ID NO: 900 - protein, 120 aa, Artificial Sequence; identical to SEQ ID NO: 892
  synthetic polypeptide

SEQ ID NO: 901 - protein, 108 aa, Artificial Sequence
  synthetic polypeptide
EIVLTQSPGTLSLSPGERATLSCRASQSVRSSYLAWYQQKPGQAPRLLIYGASSRATGIPDRFSGSGSGTDFTLTISRLEPEDFAVYYCQQYGDLPFTFGCGTKVDIK

SEQ ID NO: 902 - protein, 120 aa, Artificial Sequence; identical to SEQ ID NO: 888
  synthetic polypeptide

SEQ ID NO: 903 - protein, 108 aa, Artificial Sequence
  synthetic polypeptide
EIVLTQSPGTLSLSPGERATLSCRASQGVRSSYLAWYQQKPGQAPRLLIYGASSRATGIPDRFSGSGSGTDFTLTINRLEPEDFAVYYCQQYGSSPPTFGCGTKVDIK

SEQ ID NO: 904 - protein, 120 aa, Artificial Sequence; identical to SEQ ID NO: 896
  synthetic polypeptide

SEQ ID NO: 905 - protein, 108 aa, Artificial Sequence
  synthetic polypeptide
EIVLTQSPGTLSLSPGERATLSCRASQSVRSNYLAWYQQKPGQAPRLLIYGASSRATGIPDRFSGSGSGTDFTLTINRLEPEDFAVYYCQQYGSSPPTFGCGTKVDIK

SEQ ID NO: 906 - protein, 120 aa, Artificial Sequence
  synthetic polypeptide
EVQLLESGGGLVQPGGSLRLSCAASGFTFSSYAMSWVRQAPGKCLEWVSVISGSGGITDFAESVKGRFTISRDNSRNTLYLQMNSLRAEDTAVYFCARHDYSNYFFFDYWGQGTLVTVSS

SEQ ID NO: 907 - protein, 107 aa, Artificial Sequence; identical to SEQ ID NO: 847
  synthetic polypeptide

SEQ ID NO: 908 - protein, 120 aa, Artificial Sequence; identical to SEQ ID NO: 866
  synthetic polypeptide

SEQ ID NO: 909 - protein, 108 aa, Artificial Sequence
  synthetic polypeptide
EIVLTQSPGTLSLSPGERATLSCRASQSVRSSYLAWYQQKPGQAPRLLIYGASSRATGIPDRFSGSGSGTDFTLTISRLEPEDFAVYFCQQYGSSPPTFGCGTRLEIK

SEQ ID NO: 910 - protein, 120 aa, Artificial Sequence
  synthetic polypeptide
EVQLLESGGGLVQPGGSLRLSCAASGFTFSIYAMSWVRQAPGKCLEWVSAIGGSGGSTFYAESVKGRFTISRDNSKNTLYLQMNSLRAEDTAVYYCAKHDYSNYPYFDYWGQGTLVTVSS

SEQ ID NO: 911 - protein, 108 aa, Artificial Sequence
  synthetic polypeptide
EIVLTQSPGTLSLSPGERATLSCRASQSVRSSYVAWYQQKPGQAPRLLIYGASSRATGIPDRFSGSGSGTDFTLTISRLEPEDFAVYYCQQYGDLPFTFGCGTRLEIK

SEQ ID NO: 912 - protein, 125 aa, Artificial Sequence
  synthetic polypeptide
QVQLQESGPGLVKPSQTLSLTCTVSGGSISSSSYYWGWIRQPPGKCLEWIGSIYHSGGTYFNPSLKSRVTISVDTSKNQFSLKLSSVTAADTAVYYCARHYEILTGYYPDVFDIWGQGTMVTVSS

SEQ ID NO: 913 - protein, 107 aa, Artificial Sequence
  synthetic polypeptide
DIQMTQSPSSLSASVGDRVTITCRASQSISSYLNWYQQKPGKAPKLLIYAASNLQSGVSSRFSGSGSGTDFTLTISSLQPEDFATYYCQQSFSSPRTFGCGTKVEIK

SEQ ID NO: 914 - protein, 120 aa, Artificial Sequence
  synthetic polypeptide
EVQLVESGGGLVKPGGSLRLSCAASGFTFSSYSMNWVRQAPGKCLEWVSYISSSGGYIYYAESVKGRFTISRDNAKNSLYLQMNSLRAEDAAVYYCSRGDYSNYAYFDYWGQGTLVTVSS

SEQ ID NO: 915 - protein, 107 aa, Artificial Sequence; identical to SEQ ID NO: 857
  synthetic polypeptide

SEQ ID NO: 916 - protein, 120 aa, Artificial Sequence
  synthetic polypeptide
EVQLLESGGGLVQPGGSLRLSCAASGFTFSVYAMSWVRQAPGKCLEWVSTISGSGGSTFYAESVKGRFTISRDNSKNTLYLQMNRLRAEDTAVYYCARHDYSNYAYFDYWGQGTLVTVSS

SEQ ID NO: 917 - protein, 108 aa, Artificial Sequence; identical to SEQ ID NO: 839
  synthetic polypeptide

SEQ ID NO: 918 - protein, 124 aa, Artificial Sequence
  synthetic polypeptide
QVQLVESGGGVVQPGRSLRLSCAASGFMFSSYGMHWVRQAPGKCLEWVAVISYEGSNKYYAESVKGRFTISRDNSKNTLYLQMNSLRAEDTAVYYCARGRYYGSGNYNHGMDVWGQGTTVTVSS

SEQ ID NO: 919 - protein, 107 aa, Artificial Sequence; identical to SEQ ID NO: 851
  synthetic polypeptide

SEQ ID NO: 920 - protein, 122 aa, Artificial Sequence
  synthetic polypeptide
QVQLVESGGGVVQPGRSLRLSCAASGFTFSSYGMHWVRQAPGKCLEWVAVTWYDASNKYYGDAVKGRFTISRDNSKNTLYLQMNSLRAEDTAVYYCARDLLRGVKGYAMDVWGQGTTVTVSS

SEQ ID NO: 921 - protein, 108 aa, Artificial Sequence
  synthetic polypeptide
EIVLTQSPGTLSLSPGERATLSCRASQSLRRIYLAWYQQKPGQAPRLLIYDVFDRATGIPDRFSGGGSGTDFTLTISRLEPEDFAVYYCQQYSESPFTFGCGTKVDIK

SEQ ID NO: 922 - protein, 121 aa, Artificial Sequence
  synthetic polypeptide
QVQLVQSGAEVKKPGASVKVSCKASGYTFTSYGISWVRQAPGQCLEWMGWISAYQGYTHYAQKLQGRVTMTTDTSTSTAYMELRSLRSDDTAVYYCARDYGGNDYYGMDVWGQGTTVTVSS

SEQ ID NO: 923 - protein, 110 aa, Artificial Sequence
  synthetic polypeptide
QSVLTQPPSASGTPGQRVTISCSGSSSNIGINYVYWYQQLPGTAPKLLIYRSDQRPSGVPDRFSGSKSGTSASLALSGLRSEDEADYYCAAFDESLSGVVFGCGTKLTVL

SEQ ID NO: 924 - protein, 121 aa, Artificial Sequence
  synthetic polypeptide
QAQLVESGGGVVQPGRSLRLSCAASGFTFSYYGMHWVRQAPGKCLEWVAVIWYDASNKYYADAVKGRFTISRDNSKNTLYLQMNSLRAEDTAVYYCARDREMGSRGDFDYWGQGTLVTVSS

SEQ ID NO: 925 - protein, 107 aa, Artificial Sequence
  synthetic polypeptide
DIQMTQSPSSLSASVGDRVTITCRASQGINNYLAWFQQKPGKAPKSLIYAVSILQSGVPSKFSGSGSGTDFTLTISNLQPEDFATYYCQQYNFYPFSFGCGTKVDIK

SEQ ID NO: 926 - protein, 118 aa, Artificial Sequence
  synthetic polypeptide
QVQLQQWGAGLLKPSETLSLTCAVYGGSFSGFYWSWIRQPPGKCLEWIGEIYHSGHATNNPSLKSRVTISLDTSKNQFSLKLNSVTAADTAVYYCARGGNSGYIFDYWGQGTLVTVSS

SEQ ID NO: 927 - protein, 107 aa, Artificial Sequence
  synthetic polypeptide
DVQMTQSPSSLSASVGDRVTITCRTSQYIGRYLNWYQQKPGKAPKVLIYGASTLQQGVPSRFSGSGSGTDFTLTITSLQPEDFASYYCQQTYSTPRTFGCGTKVEIK

SEQ ID NO: 928 - protein, 120 aa, Artificial Sequence
  synthetic polypeptide
QVQLVESGGGVVQPGRSLRLSCAASGFTFSTYGMHWVRQAPGKCLEWVAVIWYEGSNKYYGESVKGRFTISRDNSKNTLYLQMNSLRAEDTAVYYCARDNSHYYYGMDVWGQGTTVTVSS

SEQ ID NO: 929 - protein, 111 aa, Artificial Sequence
  synthetic polypeptide
QSVLTQPPSVSGAPGQRVTISCTGSSSNIGAGYDVNWYQQFPGTAPKLLIYVNNNRPSGVPDRFSGSTSGTSASLAITGLQAEDEADYYCQSYDTSLSASVFGCGTRLTVL

SEQ ID NO: 930 - protein, 120 aa, Artificial Sequence
  synthetic polypeptide
QVQLVESGGGVVQPGRSLRLSCAASGFTFSTYGMHWVRQAPGKCLEWVAVIWYEGSNKYYGESVKGRFTISRDNSKNTLYLQMNSLRAEDTAVYYCARDNSHYYYGMDVWGQGTLVTVSS

SEQ ID NO: 931 - protein, 111 aa, Artificial Sequence
  synthetic polypeptide
QSVLTQPPSVSGAPGQRVTISCTGSSSNIGAGYDVNWYQQLPGTAPKLLIYVNNNRPSGVPDRFSGSKSGTSASLAITGLQAEDEADYYCQSYETSLSASVFGCGTRLTVL

SEQ ID NO: 932 - protein, 120 aa, Artificial Sequence
  synthetic polypeptide
QMQLQESGPGLVKPSETLSLTCTVSGGSIESGVYYWSWIRQPPGKCLEWIGYIYYSGSTSYNPSLKSRLTMSVDTSKNQFSLKLSSVTAADTAVYYCARSGYSYALFDYWGQGTLVTVSS

SEQ ID NO: 933 - protein, 107 aa, Artificial Sequence
  synthetic polypeptide
DIQMTQSPSSLSASLGDRVTITCRASQSVDRYFNWYQQKPGKAPKVLIFAASSLQSGVPSRFSGSGSGTDFTLTISSLQPEDFATYYCQQSYSTPWTFGCGTKVEVK

SEQ ID NO: 934 - protein, 120 aa, Artificial Sequence
  synthetic polypeptide
QVQLQESGPGLVKPSQTLSLTCTVSGDSIISGGYYWSWIRQPPGKCLEWIGYIFYSGSTDYNPSLKSRVTISVDTSKNQFSLKLSSVTAADTAVYYCARSGYSYALFDAWGQGTLVTVSS

SEQ ID NO: 935 - protein, 107 aa, Artificial Sequence
  synthetic polypeptide
DIQMTQSPSSLSASVGDRVTISCRASQFIGRYFNWYQQKPGKAPKVLIYAESSLQSGVPSRFSGSGSGTEFTLTISSLQPEDFATYYCQQSYSTPWTFGCGTKVEIK

SEQ ID NO: 936 - protein, 120 aa, Artificial Sequence
  synthetic polypeptide
EVQLLESGGGLVQPGGSLRLSCAASGFTFSSYAMSWVRQAPGKCLEWVSVISGSGGRPNYADSVKGRFTISRDNSKNTLYLQMNSLRDEDTAVYYCAKVDYSNYLFFDYWGQGTLVTVSS

SEQ ID NO: 937 - protein, 108 aa, Artificial Sequence; identical to SEQ ID NO: 861
  synthetic polypeptide

SEQ ID NO: 938 - protein, 120 aa, Artificial Sequence
  synthetic polypeptide
EVQLLESGGGLVQPGGSLKLSCAASGFTFSIYAMSWVRQAPGKCLEWVSAISGSGGSTFYADSVKGRFTISRDNSKNTLYLQMNSLRAEDTAVYYCAKHDYSNYPYFDYWGQGTLVTVSS

SEQ ID NO: 939 - protein, 108 aa, Artificial Sequence; identical to SEQ ID NO: 863
  synthetic polypeptide

SEQ ID NO: 940 - protein, 120 aa, Artificial Sequence
  synthetic polypeptide
EVQLLESGGGMVQPGGSLRLSCAASGFTFSSYAMSWVRQAPGKCLEWVSAISGSGGRTFYADSVEGRFTISRDNSKNTLFLQMNSLRAEDTAVYYCAKHDYSNYPYFDYWGQGTLVTVSS

SEQ ID NO: 941 - protein, 108 aa, Artificial Sequence; identical to SEQ ID NO: 865
  synthetic polypeptide

SEQ ID NO: 942 - protein, 120 aa, Artificial Sequence
  synthetic polypeptide
EVQLLESGGGMVQPGGSLRLSCAASGFTFSSYAMSWVRQAPGKCLEWVSAISGSGGRTFYADSVEGRFTISRDNSKNTLYLQMNSLRAEDTAVYYCAKHDYSNYPYFDYWGQGTLVTVSS

SEQ ID NO: 943 - protein, 108 aa, Artificial Sequence; identical to SEQ ID NO: 867
  synthetic polypeptide

SEQ ID NO: 944 - protein, 120 aa, Artificial Sequence
  synthetic polypeptide
EVQLLESGGGLVQSGGSLRLSCAASGFTFSSYAMSWVRQAPGKCLEWVSAISGSGGRTHYADSVKGRFTISRDNSKNTLYLQMNSLRAEDTAVYYCAKHDYSNYPYFDYWGQGTLVTVSS

SEQ ID NO: 945 - protein, 108 aa, Artificial Sequence; identical to SEQ ID NO: 865
  synthetic polypeptide

SEQ ID NO: 946 - protein, 120 aa, Artificial Sequence
  synthetic polypeptide
EVQLLESGGGLVQPGGSLRLSCAASGFTFSSYAMSWVRQAPGKCLEWVSLISGSGGRTHYADSVKGRFTISRDNSKNTLYLQMNSLRAEDTAVYYCAKHDYSNYPYFDYWGQGTLVTVSS

SEQ ID NO: 947 - protein, 108 aa, Artificial Sequence; identical to SEQ ID NO: 871
  synthetic polypeptide

SEQ ID NO: 948 - protein, 120 aa, Artificial Sequence
  synthetic polypeptide
EVQLLESGGGLVQPGGSLRLSCAASGFTFSTYAMSWVRQAPGKCLEWVSAISGSGGSTFYADSVKGRFTISRDNSKNTLSLQMNSLRAEDTAVYYCAKHDYSNYPYFDYWGQGTLVTVSS

SEQ ID NO: 949 - protein, 108 aa, Artificial Sequence; identical to SEQ ID NO: 863
  synthetic polypeptide

SEQ ID NO: 950 - protein, 119 aa, Artificial Sequence
  synthetic polypeptide
EVQLLESGGGMVQPGGSLRLSCAASGFTFSTYAMSWVRQAPGKCLEWVSAISGSGGRTFYADSVEGRFTISRDNSKNTLYLQMNSLRAEDTAVYYCAKHDYSNYPYFDYWGQGTLVTVS

SEQ ID NO: 951 - protein, 108 aa, Artificial Sequence; identical to SEQ ID NO: 875
  synthetic polypeptide

SEQ ID NO: 952 - protein, 120 aa, Artificial Sequence
  synthetic polypeptide
EVQLLESGGGLVQPGGSLRLSCAASGFTFSSYAMSWVRQAPGKCLEWVSAISGSGGYTYYADSVKGRFTISRDNSKNTLYLQMNSLRAEDTAVYYCAKHDYSNYPYFDYWGQGTLVTVSS

SEQ ID NO: 953 - protein, 108 aa, Artificial Sequence; identical to SEQ ID NO: 877
  synthetic polypeptide

SEQ ID NO: 954 - protein, 120 aa, Artificial Sequence
  synthetic polypeptide
EVQLLESGGGLAQPGGSLRLSCAASGFTFSSYAMSWVRQAPGKCLEWVSAISGSGGSTFYADSVKGRFTISRDNSKNTLYLQMNSLRAEDTAVYFCAKHDYSNYPYFDYWGQGTLVTVSS

SEQ ID NO: 955 - protein, 108 aa, Artificial Sequence; identical to SEQ ID NO: 839
  synthetic polypeptide

SEQ ID NO: 956 - protein, 120 aa, Artificial Sequence; identical to SEQ ID NO: 942
  synthetic polypeptide

SEQ ID NO: 957 - protein, 108 aa, Artificial Sequence; identical to SEQ ID NO: 877
  synthetic polypeptide

SEQ ID NO: 958 - protein, 120 aa, Artificial Sequence; identical to SEQ ID NO: 942
  synthetic polypeptide

SEQ ID NO: 959 - protein, 108 aa, Artificial Sequence; identical to SEQ ID NO: 883
  synthetic polypeptide

SEQ ID NO: 960 - protein, 120 aa, Artificial Sequence; identical to SEQ ID NO: 858
  synthetic polypeptide

SEQ ID NO: 961 - protein, 108 aa, Artificial Sequence
  synthetic polypeptide
EIVLTQSPGTLSLSPGERATLSCRASQSVRGNYLAWYQQKPGQAPRLLIYGASSRATGIPDRFSGSGSGTDFTLTISRLEPEDFAVYYCQQYGYSPFTFGPGTKVEIK

SEQ ID NO: 962 - protein, 120 aa, Artificial Sequence
  synthetic polypeptide
EVQLLESGGGLVQPGGSLRLSCAASGFTFSSYAMSWVRQAPGKCLEWVSAISGSGGSTFYADSVQGRFTISRDNSKNTLYLQVNSLRAEDTAVYYCARHDYSNYPYFDYWGQGTLVTVSS

SEQ ID NO: 963 - protein, 108 aa, Artificial Sequence; identical to SEQ ID NO: 885
  synthetic polypeptide

SEQ ID NO: 964 - protein, 120 aa, Artificial Sequence
  synthetic polypeptide
EVQLLESGGGLVQPGGSLRLSCAASGFTFSTYAMSWVRQAPGKCLEWVSAISGSGGGTFYADSVKGRFTISRDNSKNTLYLQMNSLRAEDTAVYYCAKHDYSNYPYFDYWGQGTLVTVSS

SEQ ID NO: 965 - protein, 108 aa, Artificial Sequence; identical to SEQ ID NO: 887
  synthetic polypeptide

SEQ ID NO: 966 - protein, 120 aa, Artificial Sequence
  synthetic polypeptide
EVQLLESGGGLVQPGGSLRLSCAASGFTFSTYAMSWVRQAPGKCLEWVSLISGSGGRTYYADSVKGRFTISRDNSKNTLYLQMNSLRAEDTAVYYCAKHDYSNYPYFDYWGQGTLVTVSS

SEQ ID NO: 967 - protein, 108 aa, Artificial Sequence; identical to SEQ ID NO: 889
  synthetic polypeptide

SEQ ID NO: 968 - protein, 120 aa, Artificial Sequence
  synthetic polypeptide
EVQLLESGGGLVQPGGSLRLSCAASGFTFSSYAMSWVRQSPGKCLEWVSAISGSGGRAQYADSVQGRFTVSRDNSKNTLYLQMNSLRAEDTAVYYCAKHDYSNYPYFDYWGQGTLVTVSS

SEQ ID NO: 969 - protein, 107 aa, Artificial Sequence; identical to SEQ ID NO: 891
  synthetic polypeptide

SEQ ID NO: 970 - protein, 120 aa, Artificial Sequence
  synthetic polypeptide
EVQLLESGGGMVQPGGSLRLSCAASGFTFSSYAMSWVRQAPGKCLEWVSAISGSGGRTFYADSVEGRFTISRDNSKNTLYLQMNSLRAEDTAVYYCTKHDYSNYPYFDYWGQGTLVTVSS

SEQ ID NO: 971 - protein, 108 aa, Artificial Sequence; identical to SEQ ID NO: 893
  synthetic polypeptide

SEQ ID NO: 972 - protein, 120 aa, Artificial Sequence
  synthetic polypeptide
EVQLLESGGGLVQPGGSLRLSCAASGFTFSSYAMSWVRQAPGKCLEWVSAIGDGGGYTYYADSVKGRFTISRDNSKNTLSLLMNSLRAEDTAVYYCARHDYSNYPYFDYWGQGTLVTVSS

SEQ ID NO: 973 - protein, 108 aa, Artificial Sequence; identical to SEQ ID NO: 895
  synthetic polypeptide

SEQ ID NO: 974 - protein, 120 aa, Artificial Sequence
  synthetic polypeptide
EVQLLESGGGVVQPGRSLRLSCAASGFTFSSYAMSWVRQAPGKCLEWVSAISGSGGRTFYADSVEGRFTISRDNSKNTLYLQMNSLRAEDTAVYYCAKHDYSNYPYFDYWGQGTLVTVSS

SEQ ID NO: 975 - protein, 108 aa, Artificial Sequence; identical to SEQ ID NO: 897
  synthetic polypeptide

SEQ ID NO: 976 - protein, 120 aa, Artificial Sequence
  synthetic polypeptide
EVQLLESGGGVVQPGRSLRLSCAASGFTFSSYAMSWVRQAPGKCLEWVSAISGSGGGTFYADSVEGRFTISRDNSKNTLYLQMNSLRAEDTAVYYCARHDYSNYPYFDYWGLGTLVTVSS

SEQ ID NO: 977 - protein, 108 aa, Artificial Sequence; identical to SEQ ID NO: 899
  synthetic polypeptide

SEQ ID NO: 978 - protein, 120 aa, Artificial Sequence; identical to SEQ ID NO: 970
  synthetic polypeptide

SEQ ID NO: 979 - protein, 108 aa, Artificial Sequence; identical to SEQ ID NO: 901
  synthetic polypeptide

SEQ ID NO: 980 - protein, 120 aa, Artificial Sequence; identical to SEQ ID NO: 966
  synthetic polypeptide

SEQ ID NO: 981 - protein, 108 aa, Artificial Sequence; identical to SEQ ID NO: 903
  synthetic polypeptide

SEQ ID NO: 982 - protein, 120 aa, Artificial Sequence; identical to SEQ ID NO: 974
  synthetic polypeptide

SEQ ID NO: 983 - protein, 108 aa, Artificial Sequence; identical to SEQ ID NO: 905
  synthetic polypeptide

SEQ ID NO: 984 - protein, 120 aa, Artificial Sequence; identical to SEQ ID NO: 846
  synthetic polypeptide

SEQ ID NO: 985 - protein, 107 aa, Artificial Sequence; identical to SEQ ID NO: 847
  synthetic polypeptide

SEQ ID NO: 986 - protein, 120 aa, Artificial Sequence; identical to SEQ ID NO: 942
  synthetic polypeptide

SEQ ID NO: 987 - protein, 108 aa, Artificial Sequence; identical to SEQ ID NO: 909
  synthetic polypeptide

SEQ ID NO: 988 - protein, 120 aa, Artificial Sequence
  synthetic polypeptide
EVQLLESGGGLVQPGGSLRLSCAASGFTFSIYAMSWVRQAPGKCLEWVSAIGDSGGSTFYADSVKGRFTISRDNSKNTLYLQMNSLRAEDTAVYYCAKHDYSNYPYFDYWGQGTLVTVSS

SEQ ID NO: 989 - protein, 108 aa, Artificial Sequence; identical to SEQ ID NO: 911
  synthetic polypeptide

SEQ ID NO: 990 - protein, 125 aa, Artificial Sequence; identical to SEQ ID NO: 912
  synthetic polypeptide

SEQ ID NO: 991 - protein, 107 aa, Artificial Sequence; identical to SEQ ID NO: 913
  synthetic polypeptide

SEQ ID NO: 992 - protein, 120 aa, Artificial Sequence; identical to SEQ ID NO: 856
  synthetic polypeptide

SEQ ID NO: 993 - protein, 107 aa, Artificial Sequence; identical to SEQ ID NO: 857
  synthetic polypeptide

SEQ ID NO: 994 - protein, 120 aa, Artificial Sequence; identical to SEQ ID NO: 838
  synthetic polypeptide

SEQ ID NO: 995 - protein, 108 aa, Artificial Sequence; identical to SEQ ID NO: 839
  synthetic polypeptide

SEQ ID NO: 996 - protein, 124 aa, Artificial Sequence; identical to SEQ ID NO: 850
  synthetic polypeptide

SEQ ID NO: 997 - protein, 107 aa, Artificial Sequence; identical to SEQ ID NO: 851
  synthetic polypeptide

SEQ ID NO: 998 - protein, 120 aa, Artificial Sequence
  synthetic polypeptide
EVQLLESGGGLVQPGGSLRLSCAASGFTFSSYAMSWVRQAPGKGLEWVSVISGSGGRPNYAESVKGRFTISRDNSKNTLYLQMNSLRDEDTAVYYCAKVDYSNYLFFDYWGQGTLVTVSS

SEQ ID NO: 999 - protein, 108 aa, Artificial Sequence; identical to SEQ ID NO: 737
  synthetic polypeptide

SEQ ID NO: 1000 - protein, 120 aa, Artificial Sequence
  synthetic polypeptide
EVQLLESGGGLVQPGGSLKLSCAASGFTFSIYAMSWVRQAPGKGLEWVSAISGSGGSTFYAESVKGRFTISRDNSKNTLYLQMNSLRAEDTAVYYCAKHDYSNYPYFDYWGQGTLVTVSS

SEQ ID NO: 1001 - protein, 108 aa, Artificial Sequence; identical to SEQ ID NO: 739
  synthetic polypeptide

SEQ ID NO: 1002 - protein, 120 aa, Artificial Sequence
  synthetic polypeptide
EVQLLESGGGMVQPGGSLRLSCAASGFTFSSYAMSWVRQAPGKGLEWVSAISGSGGRTFYAESVEGRFTISRDNSKNTLFLQMNSLRAEDTAVYYCAKHDYSNYPYFDYWGQGTLVTVSS

SEQ ID NO: 1003 - protein, 108 aa, Artificial Sequence; identical to SEQ ID NO: 741
  synthetic polypeptide

SEQ ID NO: 1004 - protein, 120 aa, Artificial Sequence
  synthetic polypeptide
EVQLLESGGGMVQPGGSLRLSCAASGFTFSSYAMSWVRQAPGKGLEWVSAISGSGGRTFYAESVEGRFTISRDNSKNTLYLQMNSLRAEDTAVYYCAKHDYSNYPYFDYWGQGTLVTVSS

SEQ ID NO: 1005 - protein, 108 aa, Artificial Sequence; identical to SEQ ID NO: 743
  synthetic polypeptide

SEQ ID NO: 1006 - protein, 120 aa, Artificial Sequence
  synthetic polypeptide
EVQLLESGGGLVQSGGSLRLSCAASGFTFSSYAMSWVRQAPGKGLEWVSAISGSGGRTHYAESVKGRFTISRDNSKNTLYLQMNSLRAEDTAVYYCAKHDYSNYPYFDYWGQGTLVTVSS

SEQ ID NO: 1007 - protein, 108 aa, Artificial Sequence; identical to SEQ ID NO: 741
  synthetic polypeptide

SEQ ID NO: 1008 - protein, 120 aa, Artificial Sequence
  synthetic polypeptide
EVQLLESGGGLVQPGGSLRLSCAASGFTFSTYAMSWVRQAPGKGLEWVSAISGSGGSTFYAESVKGRFTISRDNSKNTLSLQMNSLRAEDTAVYYCAKHDYSNYPYFDYWGQGTLVTVSS

SEQ ID NO: 1009 - protein, 108 aa, Artificial Sequence; identical to SEQ ID NO: 739
  synthetic polypeptide

SEQ ID NO: 1010 - protein, 120 aa, Artificial Sequence
  synthetic polypeptide
EVQLLESGGGMVQPGGSLRLSCAASGFTFSTYAMSWVRQAPGKGLEWVSAISGSGGRTFYAESVEGRFTISRDNSKNTLYLQMNSLRAEDTAVYYCAKHDYSNYPYFDYWGQGTLVTVSS

SEQ ID NO: 1011 - protein, 108 aa, Artificial Sequence; identical to SEQ ID NO: 753
  synthetic polypeptide

SEQ ID NO: 1012 - protein, 120 aa, Artificial Sequence
  synthetic polypeptide
EVQLLESGGGLVQPGGSLRLSCAASGFTFSSYAMSWVRQAPGKGLEWVSAISGSGGYTYYAESVKGRFTISRDNSKNTLYLQMNSLRAEDTAVYYCAKHDYSNYPYFDYWGQGTLVTVSS

SEQ ID NO: 1013 - protein, 108 aa, Artificial Sequence; identical to SEQ ID NO: 755
  synthetic polypeptide

SEQ ID NO: 1014 - protein, 120 aa, Artificial Sequence
  synthetic polypeptide
EVQLLESGGGLAQPGGSLRLSCAASGFTFSSYAMSWVRQAPGKGLEWVSAISGSGGSTFYAESVKGRFTISRDNSKNTLYLQMNSLRAEDTAVYFCAKHDYSNYPYFDYWGQGTLVTVSS

SEQ ID NO: 1015 - protein, 108 aa, Artificial Sequence; identical to SEQ ID NO: 757
  synthetic polypeptide

SEQ ID NO: 1016 - protein, 120 aa, Artificial Sequence; identical to SEQ ID NO: 1004
  synthetic polypeptide

SEQ ID NO: 1017 - protein, 108 aa, Artificial Sequence; identical to SEQ ID NO: 755
  synthetic polypeptide

SEQ ID NO: 1018 - protein, 120 aa, Artificial Sequence; identical to SEQ ID NO: 1004
  synthetic polypeptide

SEQ ID NO: 1019 - protein, 108 aa, Artificial Sequence; identical to SEQ ID NO: 763
  synthetic polypeptide

SEQ ID NO: 1020 - protein, 120 aa, Artificial Sequence
  synthetic polypeptide
EVQLLESGGGLVQPGGSLRLSCAASGFTFSSYAMSWVRQAPGKGLEWVSAISGSGGSTFYAESVQGRFTISRDNSKNTLYLQVNSLRAEDTAVYYCARHDYSNYPYFDYWGQGTLVTVSS

SEQ ID NO: 1021 - protein, 108 aa, Artificial Sequence; identical to SEQ ID NO: 961
  synthetic polypeptide

SEQ ID NO: 1022 - protein, 120 aa, Artificial Sequence
  synthetic polypeptide
EVQLLESGGGLVQPGGSLRLSCAASGFTFSTYAMSWVRQAPGKGLEWVSAISGSGGGTFYAESVKGRFTISRDNSKNTLYLQMNSLRAEDTAVYYCAKHDYSNYPYFDYWGQGTLVTVSS

SEQ ID NO: 1023 - protein, 108 aa, Artificial Sequence; identical to SEQ ID NO: 765
  synthetic polypeptide

SEQ ID NO: 1024 - protein, 120 aa, Artificial Sequence
  synthetic polypeptide
EVQLLESGGGLVQPGGSLRLSCAASGFTFSTYAMSWVRQAPGKGLEWVSLISGSGGRTYYAESVKGRFTISRDNSKNTLYLQMNSLRAEDTAVYYCAKHDYSNYPYFDYWGQGTLVTVSS

SEQ ID NO: 1025 - protein, 108 aa, Artificial Sequence; identical to SEQ ID NO: 767
  synthetic polypeptide

SEQ ID NO: 1026 - protein, 120 aa, Artificial Sequence
  synthetic polypeptide
EVQLLESGGGLVQPGGSLRLSCAASGFTFSSYAMSWVRQSPGKGLEWVSAISGSGGRAQYAESVQGRFTVSRDNSKNTLYLQMNSLRAEDTAVYYCAKHDYSNYPYFDYWGQGTLVTVSS

SEQ ID NO: 1027 - protein, 107 aa, Artificial Sequence; identical to SEQ ID NO: 773
  synthetic polypeptide

SEQ ID NO: 1028 - protein, 120 aa, Artificial Sequence
  synthetic polypeptide
EVQLLESGGGMVQPGGSLRLSCAASGFTFSSYAMSWVRQAPGKGLEWVSAISGSGGRTFYAESVEGRFTISRDNSKNTLYLQMNSLRAEDTAVYYCTKHDYSNYPYFDYWGQGTLVTVSS

SEQ ID NO: 1029 - protein, 108 aa, Artificial Sequence; identical to SEQ ID NO: 775
  synthetic polypeptide

SEQ ID NO: 1030 - protein, 120 aa, Artificial Sequence
  synthetic polypeptide
EVQLLESGGGLVQPGGSLRLSCAASGFTFSSYAMSWVRQAPGKGLEWVSAIGEGGGYTYYAESVKGRFTISRDNSKNTLSLLMNSLRAEDTAVYYCARHDYSNYPYFDYWGQGTLVTVSS

SEQ ID NO: 1031 - protein, 108 aa, Artificial Sequence; identical to SEQ ID NO: 785
  synthetic polypeptide

SEQ ID NO: 1032 - protein, 120 aa, Artificial Sequence
  synthetic polypeptide
EVQLLESGGGVVQPGRSLRLSCAASGFTFSSYAMSWVRQAPGKGLEWVSAISGSGGRTFYAESVEGRFTISRDNSKNTLYLQMNSLRAEDTAVYYCAKHDYSNYPYFDYWGQGTLVTVSS

SEQ ID NO: 1033 - protein, 108 aa, Artificial Sequence; identical to SEQ ID NO: 787
  synthetic polypeptide

SEQ ID NO: 1034 - protein, 120 aa, Artificial Sequence
  synthetic polypeptide
EVQLLESGGGVVQPGRSLRLSCAASGFTFSSYAMSWVRQAPGKGLEWVSAISGSGGGTFYAESVEGRFTISRDNSKNTLYLQMNSLRAEDTAVYYCARHDYSNYPYFDYWGLGTLVTVSS

SEQ ID NO: 1035 - protein, 108 aa, Artificial Sequence; identical to SEQ ID NO: 789
  synthetic polypeptide

SEQ ID NO: 1036 - protein, 120 aa, Artificial Sequence; identical to SEQ ID NO: 1028
  synthetic polypeptide

SEQ ID NO: 1037 - protein, 108 aa, Artificial Sequence; identical to SEQ ID NO: 793
  synthetic polypeptide

SEQ ID NO: 1038 - protein, 120 aa, Artificial Sequence; identical to SEQ ID NO: 1024
  synthetic polypeptide

SEQ ID NO: 1039 - protein, 108 aa, Artificial Sequence; identical to SEQ ID NO: 795
  synthetic polypeptide

SEQ ID NO: 1040 - protein, 120 aa, Artificial Sequence; identical to SEQ ID NO: 1032
  synthetic polypeptide

SEQ ID NO: 1041 - protein, 108 aa, Artificial Sequence; identical to SEQ ID NO: 797
  synthetic polypeptide

SEQ ID NO: 1042 - protein, 120 aa, Artificial Sequence
  synthetic polypeptide
EVQLLESGGGLVQPGGSLRLSCAASGFTFSSYAMSWVRQAPGKGLEWVSVISGSGGITDFAESVKGRFTISRDNSRNTLYLQMNSLRAEDTAVYFCARHDYSNYFFFDYWGQGTLVTVSS

SEQ ID NO: 1043 - protein, 107 aa, Artificial Sequence; identical to SEQ ID NO: 807
  synthetic polypeptide

SEQ ID NO: 1044 - protein, 120 aa, Artificial Sequence; identical to SEQ ID NO: 1004
  synthetic polypeptide

SEQ ID NO: 1045 - protein, 108 aa, Artificial Sequence; identical to SEQ ID NO: 817
  synthetic polypeptide

SEQ ID NO: 1046 - protein, 120 aa, Artificial Sequence
  synthetic polypeptide
EVQLLESGGGLVQPGGSLRLSCAASGFTFSIYAMSWVRQAPGKGLEWVSAIGGSGGSTFYAESVKGRFTISRDNSKNTLYLQMNSLRAEDTAVYYCAKHDYSNYPYFDYWGQGTLVTVSS

SEQ ID NO: 1047 - protein, 108 aa, Artificial Sequence; identical to SEQ ID NO: 819
  synthetic polypeptide

SEQ ID NO: 1048 - protein, 125 aa, Artificial Sequence; identical to SEQ ID NO: 826
  synthetic polypeptide

SEQ ID NO: 1049 - protein, 107 aa, Artificial Sequence; identical to SEQ ID NO: 827
  synthetic polypeptide

SEQ ID NO: 1050 - protein, 120 aa, Artificial Sequence
  synthetic polypeptide
EVQLVESGGGLVKPGGSLRLSCAASGFTFSSYSMNWVRQAPGKGLEWVSYISSSGGYIYYAESVKGRFTISRDNAKNSLYLQMNSLRAEDAAVYYCSRGDYSNYAYFDYWGQGTLVTVSS

SEQ ID NO: 1051 - protein, 107 aa, Artificial Sequence; identical to SEQ ID NO: 835
  synthetic polypeptide

SEQ ID NO: 1052 - protein, 120 aa, Artificial Sequence
  synthetic polypeptide
EVQLLESGGGLVQPGGSLRLSCAASGFTFSVYAMSWVRQAPGKGLEWVSTISGSGGSTFYAESVKGRFTISRDNSKNTLYLQMNRLRAEDTAVYYCARHDYSNYAYFDYWGQGTLVTVSS

SEQ ID NO: 1053 - protein, 108 aa, Artificial Sequence; identical to SEQ ID NO: 757
  synthetic polypeptide

SEQ ID NO: 1054 - protein, 124 aa, Artificial Sequence
  synthetic polypeptide
QVQLVESGGGVVQPGRSLRLSCAASGFMFSSYGMHWVRQAPGKGLEWVAVISYEGSNKYYAESVKGRFTISRDNSKNTLYLQMNSLRAEDTAVYYCARGRYYGSGNYNHGMDVWGQGTTVTVSS

SEQ ID NO: 1055 - protein, 107 aa, Artificial Sequence; identical to SEQ ID NO: 821
  synthetic polypeptide

SEQ ID NO: 1056 - protein, 122 aa, Artificial Sequence
  synthetic polypeptide
QVQLVESGGGVVQPGRSLRLSCAASGFTFSSYGMHWVRQAPGKGLEWVAVTWYDASNKYYGDAVKGRFTISRDNSKNTLYLQMNSLRAEDTAVYYCARDLLRGVKGYAMDVWGQGTTVTVSS

SEQ ID NO: 1057 - protein, 108 aa, Artificial Sequence
  synthetic polypeptide
EIVLTQSPGTLSLSPGERATLSCRASQSLRRIYLAWYQQKPGQAPRLLIYDVFDRATGIPDRFSGGGSGTDFTLTISRLEPEDFAVYYCQQYSESPFTFGPGTKVDIK

SEQ ID NO: 1058 - protein, 121 aa, Artificial Sequence
  synthetic polypeptide
QVQLVQSGAEVKKPGASVKVSCKASGYTFTSYGISWVRQAPGQGLEWMGWISAYQGYTHYAQKLQGRVTMTTDTSTSTAYMELRSLRSDDTAVYYCARDYGGNDYYGMDVWGQGTTVTVSS

SEQ ID NO: 1059 - protein, 110 aa, Artificial Sequence
  synthetic polypeptide
QSVLTQPPSASGTPGQRVTISCSGSSSNIGINYVYWYQQLPGTAPKLLIYRSDQRPSGVPDRFSGSKSGTSASLALSGLRSEDEADYYCAAFDESLSGVVFGGGTKLTVL

SEQ ID NO: 1060 - protein, 121 aa, Artificial Sequence
  synthetic polypeptide
QAQLVESGGGVVQPGRSLRLSCAASGFTFSYYGMHWVRQAPGKGLEWVAVIWYDASNKYYADAVKGRFTISRDNSKNTLYLQMNSLRAEDTAVYYCARDREMGSRGDFDYWGQGTLVTVSS

SEQ ID NO: 1061 - protein, 107 aa, Artificial Sequence
  synthetic polypeptide
DIQMTQSPSSLSASVGDRVTITCRASQGINNYLAWFQQKPGKAPKSLIYAVSILQSGVPSKFSGSGSGTDFTLTISNLQPEDFATYYCQQYNFYPFSFGQGTKVDIK

SEQ ID NO: 1062 - protein, 118 aa, Artificial Sequence
  synthetic polypeptide
QVQLQQWGAGLLKPSETLSLTCAVYGGSFSGFYWSWIRQPPGKGLEWIGEIYHSGHATNNPSLKSRVTISLDTSKNQFSLKLNSVTAADTAVYYCARGGNSGYIFDYWGQGTLVTVSS

SEQ ID NO: 1063 - protein, 107 aa, Artificial Sequence
  synthetic polypeptide
DVQMTQSPSSLSASVGDRVTITCRTSQYIGRYLNWYQQKPGKAPKVLIYGASTLQQGVPSRFSGSGSGTDFTLTITSLQPEDFASYYCQQTYSTPRTFGQGTKVEIK

SEQ ID NO: 1064 - protein, 120 aa, Artificial Sequence
  synthetic polypeptide
QVQLVESGGGVVQPGRSLRLSCAASGFTFSTYGMHWVRQAPGKGLEWVAVIWYEGSNKYYGESVKGRFTISRDNSKNTLYLQMNSLRAEDTAVYYCARDNSHYYYGMDVWGQGTTVTVSS

SEQ ID NO: 1065 - protein, 111 aa, Artificial Sequence; identical to SEQ ID NO: 713
  synthetic polypeptide

SEQ ID NO: 1066 - protein, 120 aa, Artificial Sequence
  synthetic polypeptide
QVQLVESGGGVVQPGRSLRLSCAASGFTFSTYGMHWVRQAPGKGLEWVAVIWYEGSNKYYGESVKGRFTISRDNSKNTLYLQMNSLRAEDTAVYYCARDNSHYYYGMDVWGQGTLVTVSS

SEQ ID NO: 1067 - protein, 111 aa, Artificial Sequence
  synthetic polypeptide
QSVLTQPPSVSGAPGQRVTISCTGSSSNIGAGYDVNWYQQLPGTAPKLLIYVNNNRPSGVPDRFSGSKSGTSASLAITGLQAEDEADYYCQSYETSLSASVFGGGTRLTVL

SEQ ID NO: 1068 - protein, 120 aa, Artificial Sequence
  synthetic polypeptide
QMQLQESGPGLVKPSETLSLTCTVSGGSIESGVYYWSWIRQPPGKGLEWIGYIYYSGSTSYNPSLKSRLTMSVDTSKNQFSLKLSSVTAADTAVYYCARSGYSYALFDYWGQGTLVTVSS

SEQ ID NO: 1069 - protein, 107 aa, Artificial Sequence
  synthetic polypeptide
DIQMTQSPSSLSASLGDRVTITCRASQSVDRYFNWYQQKPGKAPKVLIFAASSLQSGVPSRFSGSGSGTDFTLTISSLQPEDFATYYCQQSYSTPWTFGQGTKVEVK

SEQ ID NO: 1070 - protein, 120 aa, Artificial Sequence
  synthetic polypeptide
QVQLQESGPGLVKPSQTLSLTCTVSGDSIISGGYYWSWIRQPPGKGLEWIGYIFYSGSTDYNPSLKSRVTISVDTSKNQFSLKLSSVTAADTAVYYCARSGYSYALFDAWGQGTLVTVSS

SEQ ID NO: 1071 - protein, 107 aa, Artificial Sequence
  synthetic polypeptide
DIQMTQSPSSLSASVGDRVTISCRASQFIGRYFNWYQQKPGKAPKVLIYAESSLQSGVPSRFSGSGSGTEFTLTISSLQPEDFATYYCQQSYSTPWTFGQGTKVEIK

SEQ ID NO: 1072 - protein, 115 aa, Artificial Sequence
  synthetic polypeptide
ELQVVESGGGLVQPGGSLRLSCAASGFTLSNYWMHWVRQAPRKGLEWVSTISTDNSRTYYADSVKGRFTISRDHAKNTLILQMNSLKSEDTAVYYCIRGSDYEHWGQGTQVTVSS

SEQ ID NO: 1073 - protein, 112 aa, Artificial Sequence
  synthetic polypeptide
QTVVTQEPSLSVSPGGTVTLTCGLSSGSVTTTNYPGWFQQTPGQAPRTLIYSTSSRHSGVPSRFSGSISGNKAALTITGAQPEDEADYYCALEEIGSYTYMFGGGTHLTVLG

SEQ ID NO: 1074 - protein, 122 aa, Artificial Sequence
  synthetic polypeptide
EVQLVESGGGLVQPGGSLRLSCAASGFTFSVYYMNWVRQAPGKGLEWVSDINNEGGTTYYADSVKGRFTISRDNAKNTLTLQMNSLKPEDTALYYCVRDAGYSNHVPIFDSWGQGTQVIVAS

SEQ ID NO: 1075 - protein, 112 aa, Artificial Sequence
  synthetic polypeptide
QAVVTQEPSLSVSPGGTVTLTCGLSSGSVTSSHYPGWYQQTPGQAPRLLIFNTNSRHSGVPSRFSGSISGNKAALTITGAQPEDEADYYCALLNIDDGSTMFGGGTHLTVLG

SEQ ID NO: 1076 - protein, 122 aa, Artificial Sequence
  synthetic polypeptide
EVQLVESGGGLVQPGGSLRLSCAASGFTFSVYYMNWVRQAPGKGLEWVSDINNEGDTTYYADSVKGRFTISRDNAKNTLTLQMDSLKPEDTALYYCVRDAGYSNHVPIFDSWGQGTQVIVAS

SEQ ID NO: 1077 - protein, 111 aa, Artificial Sequence
  synthetic polypeptide
QTVVTQEPSLSVSPGGTVTLTCGLSSGSVTSSNYPGWYQQTPGQAPRVLIYNTNNRHSGVPSRYSGSISGNKAALTITGAEPEDEADYYCNLHLGSYTPMFGGGTKLTVLG

SEQ ID NO: 1078 - protein, 122 aa, Artificial Sequence; identical to SEQ ID NO: 1076
  synthetic polypeptide

SEQ ID NO: 1079 - protein, 113 aa, Artificial Sequence
  synthetic polypeptide
QAVVTQEPSLSVSPGGTVTLTCGLTSGSVTSSNYPDWYQQTPGQAPRLLIYNTNSRHSGVPSRFSGSISGNKAALTITGAQPEDEADYYCALYWGYGTNVDVFGGGTKLTVLG

SEQ ID NO: 1080 - protein, 128 aa, Artificial Sequence
  synthetic polypeptide
EVQLQESGGGVVQPGGSLRLSCAASGFTFDDYAMSWVRQAPGKGLEWVSSIYMYDSSTYYADSVKGRFTISTDNAKNTVYLQMNSLKSEDTAVYYCAKDINRSYGSSWSHFGPIFSSWGQGTQVTVSS

SEQ ID NO: 1081 - protein, 112 aa, Artificial Sequence
  synthetic polypeptide
QAVVTQEPSLSVSPGGTVTLTCGLTSGSVTSSNYPDWYQQTPGQAPRLLIYNTNSRHSGVPSRFSGSISGNKAALTITGAQPEDEADYYCNLYMGSGGSKVFGGGTKLTVLG

SEQ ID NO: 1082 - protein, 119 aa, Artificial Sequence
  synthetic polypeptide
EVQVQESGGGLVHPGGSLKLSCAASGFTFDTYAMSWVRQAPGKGLEWVSAISWSGGETFYAESMKGRFTISRNNAKNTLYLQMNSLKSEDTAVYYCARGMGLAEGLTDWGQGTQVTVSS

SEQ ID NO: 1083 - protein, 119 aa, Artificial Sequence
  synthetic polypeptide
QAVVTHPPSLSASPGSSVRLTCTLISGDNIGGYDISWYQQKTGSPPRYLLYYYSDSYKHQSSGVPSRFSGSKDASANAGLLLISGLQSEDEADYYCSAYKSGSYKAPVFGGGTHLTVLG

SEQ ID NO: 1084 - protein, 119 aa, Artificial Sequence
  synthetic polypeptide
QVQLVESGGDLVQPGGSLRLSCAASGFTVSNPAMSWVRQAPGKGLEWVSEITNYGYNRYYADSVKGRFTISTDNAKNTLYLQMNSLRSEDSAVYYCTASLGLEYGYGDWGQGTQVTVSS

SEQ ID NO: 1085 - protein, 111 aa, Artificial Sequence
  synthetic polypeptide
QSALTQPPSVSGTLGKTLTISCAGTSSDVGYGNYVSWYQQLPGTAPKLLIYRVSTRASGMPDRFSGSKSGNTASLTISGLQSEDEADYYCASYTTNNKPVFGGGTHLTVLG

SEQ ID NO: 1086 - protein, 116 aa, Artificial Sequence
  synthetic polypeptide
EVQLVQPGAELRKPGASVKVSCKASGYTFTSYYIDWVRQAPGQGLEWMGRIDPEDGGTKYAQKFQGRVTFTADASTSTAYVELSSLRSEDTAVYYCASRRRDFDYWGQGTQVTVSS

SEQ ID NO: 1087 - protein, 107 aa, Artificial Sequence
  synthetic polypeptide
QSALTQPSAVSVSLGQTARITCQGGNARFSSFAWYQQKPGQAPVQVIYYNTNRPSGIPARFSGSSSGGAATLTISGAQAEDEADYYCQSYESGNYVFGGGTTLTVLG

SEQ ID NO: 1088 - protein, 131 aa, Artificial Sequence
  synthetic polypeptide
QVQLQESGPGLVKPSQTLSLACTVSGGSITTSYYYWSWIRQPPGKGLEWMGAIGSRGSTYYSPSLKTRTSISRDTSKNQFTLQLSSVTPEDTAVYYCARVTGEITYNSGSYYYTLNLFDYWGQGTQVTVSS

SEQ ID NO: 1089 - protein, 118 aa, Artificial Sequence
  synthetic polypeptide
QSVLTQPPSLSASPGSSVRLTCTLSSGNSVGNYDISWYQQKAGSPPRYLLYYYSDSYKNQGSGVPSRFSGSKDPSANAGLLLISGLQAEDEADYYCSVSNSGTYKPVFGGGSKLTVLG

SEQ ID NO: 1090 - protein, 123 aa, Artificial Sequence
  synthetic polypeptide
EVQLVESGGGLVQPGGSLRLSCAASGFTFSSYAMSWVRQAPGKGLEWVSDINSGGGSTKYNDSVKGRFAISRDNAKNTLYLQMNSLKPEDTAVYYCAKEGGSGRYWTNEYDYWGQGTQVTVSS

SEQ ID NO: 1091 - protein, 108 aa, Artificial Sequence
  synthetic polypeptide
QSALTQPSALSVTLGQTAKITCQGGRLGSSYAHWYQQKPGQAPVLVIYGNNYRPSGIPERFSGSSSGDTATLTISGAQAEDEAVYYCQSGSSNTNVMFGGGTHLTVLS

SEQ ID NO: 1092 - protein, 119 aa, Artificial Sequence
  synthetic polypeptide
QVQLVESGGGLMQPGGSLRLSCAASGFTFSSSAMSWVRQAPGKGLEWVSSIYSDSSYTYYADSVKSRFTISTDNAKNTLYLQMNSLKPDDTAVYYCAGSSDYEGSFASWGQGTQVTVSS

SEQ ID NO: 1093 - protein, 116 aa, Artificial Sequence
  synthetic polypeptide
QSVVTQPPSLSASPGSSVRLTCTLSSGNSVGNYDISWYQQKAGSPPRYLLYYYSDSVKHQGSGVPSRFSGSSDASANAGLLLISGLQPEDEADYYCSAYKSGSHVFGGGTKLTVLG

SEQ ID NO: 1094 - protein, 119 aa, Artificial Sequence
  synthetic polypeptide
QLQVVESGGGLMQPGGSLRLSCAASGFTFSGSAMSWVRQAPGKGLEWVSSIYSHSMYTYYADSVKSRFTISTDNAKNTLYLQMNSLKPDDTAVYYCAASSDYEGLFVSWGQGTQVTVSS

SEQ ID NO: 1095 - protein, 116 aa, Artificial Sequence
  synthetic polypeptide
QAVLTQPPSLSASPGSSVRLTCTLNSANSVGSYDISWYQQKAGSPPRYLLYYYSDSLSHQGSGVPSRFSGSTDASANAGLLLISGLQPEDEADYYCSAYNRGSHVFGGGTKLTVLG

SEQ ID NO: 1096 - protein, 122 aa, Artificial Sequence; identical to SEQ ID NO: 1074
  synthetic polypeptide

SEQ ID NO: 1097 - protein, 111 aa, Artificial Sequence
  synthetic polypeptide
QAVVTQEPSLSVSPGGTVTLTCGLTSGSVTSDNFPVWYQQTPGQAPRLLIYTINSRHSGVPSRFSGSITGNKAILTITGAQPEDEADYYCALYLENFANEFGGGTRLTVLG

SEQ ID NO: 1098 - protein, 122 aa, Artificial Sequence; identical to SEQ ID NO: 1074
  synthetic polypeptide

SEQ ID NO: 1099 - protein, 108 aa, Artificial Sequence
  synthetic polypeptide
QSALTQPSTVSVSLGQTARITCRGDSLERYGTNWYQQKPGQAPVLVIYDDDSRPSGIPERFSGSSSGATAALTISGAQAEDEGDYYCQSADSSGNAVFGGGTHLTVLG

SEQ ID NO: 1100 - protein, 122 aa, Artificial Sequence; identical to SEQ ID NO: 1074
  synthetic polypeptide

SEQ ID NO: 1101 - protein, 109 aa, Artificial Sequence
  synthetic polypeptide
QSALTQPSAVSVSLGQTARITCRGDTLRNYHANWYRQKPGQAPVLVIYGDDIRPSGIPERFSGSRLGGTATLTVSGAQAEDEADYYCQSSDSSGYRVVFGGGTKLTVLG

SEQ ID NO: 1102 - protein, 128 aa, Artificial Sequence; identical to SEQ ID NO: 1080
  synthetic polypeptide

SEQ ID NO: 1103 - protein, 104 aa, Artificial Sequence
  synthetic polypeptide
QPVLTQPSAVSVSLGQTARITCQGGYYTHWYQQKPGQAPVLVIYINNNRPSGIPERFSGSISGNTATLTISGAQVEDEADYYCQSGSSSTIPVFGGGTKLTVLG

SEQ ID NO: 1104 - protein, 128 aa, Artificial Sequence; identical to SEQ ID NO: 1080
  synthetic polypeptide

SEQ ID NO: 1105 - protein, 104 aa, Artificial Sequence
  synthetic polypeptide
NFMLTQPSAVSVSLGQTARITCQGGYYTHWYQQKPGQAPVLVIYVNNNRPSGIPERFSGSSSGNTATLTISGAQAEDEAAYYCQSGSSSTIPVFGGGTKLTVLG

SEQ ID NO: 1106 - protein, 122 aa, Artificial Sequence
  synthetic polypeptide
EVQLVESGGGLVQPGGSLRLSCAASGFTFSAYYMNWVRQAPGKGLEWISDINNEGYETYYADSVKGRFTISRDNAKNTLTLQMDSLKPEDTARYYCVRDAGYSNHVQIFDSWGQGTQVIVAS

SEQ ID NO: 1107 - protein, 108 aa, Artificial Sequence
  synthetic polypeptide
QAVLTQPSSVSVSLGQTAKITCQGGNLGLYGANWYQQNPGRAPILLIYGDNYRPLGIPERFTISKSGGTATLTIDGAQAEDESDYYCQSADYSGNSVFGGGTKLTVLG

SEQ ID NO: 1108 - protein, 122 aa, Artificial Sequence; identical to SEQ ID NO: 1106
  synthetic polypeptide

SEQ ID NO: 1109 - protein, 108 aa, Artificial Sequence
  synthetic polypeptide
QAVLTQPSSVSVSLGQTAKITCQGGNLWLYGANWYQQNPGRAPILLIYGDNQRPLGIPERFTISKSGGTATLTIDGAQAEDESDYYCQSADYSGNSVFGGGTKLTVLG

SEQ ID NO: 1110 - protein, 122 aa, Artificial Sequence; identical to SEQ ID NO: 1106
  synthetic polypeptide

SEQ ID NO: 1111 - protein, 108 aa, Artificial Sequence
  synthetic polypeptide
QAVLTQPSSVSVSLGQTANITCQGGNLGLYGANWYQQNPGRAPILLFYGDNYMPLGIPERFTISKSGGTATLTIDGAQAENESDYYCQSSDYPGNSVFGGGTKLTVLG

SEQ ID NO: 1112 - protein, 122 aa, Artificial Sequence; identical to SEQ ID NO: 1106
  synthetic polypeptide

SEQ ID NO: 1113 - protein, 113 aa, Artificial Sequence
  synthetic polypeptide
QAVVTQEPSLSVSPGGTVTLTCGLSSGSATSGNYPEWYQQTPGQAPRLIIYNTASRHSGVPGRFSGSISGNKAALTITGAQPEDEADYYCLLYMGGSDFNFVFGGGTKLTVLG

SEQ ID NO: 1114 - protein, 122 aa, Artificial Sequence; identical to SEQ ID NO: 1106
  synthetic polypeptide

SEQ ID NO: 1115 - protein, 113 aa, Artificial Sequence
  synthetic polypeptide
QAVVTQEPSLSVSPGGTVTLTCGLSSGSVTSSNYPDWYQQTPGQAPRLLIYNTNSRHSGVPSRFSGSISGNKAALTITGAQPEDEADYYCALYMGSGSNNVVFGGGTELTVLG

SEQ ID NO: 1116 - protein, 123 aa, Artificial Sequence
  synthetic polypeptide
QLQLVESGGGLVQPGGSLRLSCAASGFSFSHYAMSWVRQAPGKGLEWVSGDNTYDGGTRYQDSVKGRFTISRDNGKNTLYLQMNSLKPEDTAVYYCAKDTGRGIMGEYGMDYWGKGTLVTVSS

SEQ ID NO: 1117 - protein, 113 aa, Artificial Sequence
  synthetic polypeptide
QTVVTQEPSLSVSPGGTVTLTCGLKSGSVTSSNYPAWYQQTPGQAPRLLIYNTNSRHSGVPSRFSGSISGNKAALTITGAQPEDEADYYCALYMGSGSANAMFGGGTHLTVLG

SEQ ID NO: 1118 - protein, 124 aa, Artificial Sequence
  synthetic polypeptide
EVQLVESGGGLVQPGGSLRLSCAASELSFSISEMTWVRQAPGKGLEWVSGISGVTGGSSTSYADSVKGRFTISRDNDKNTLYLQMNSLIPEDTAVYYCATTSGTYYFIPEYEYWGQGTQVTVSS

SEQ ID NO: 1119 - protein, 111 aa, Artificial Sequence
  synthetic polypeptide
QSVLTQPPSVSGSPGKTVTISCAGTSSDVGYGYYVSWYQQFPGMAPKLLIYDVNKRASGIADRFSGSKAGNTASLTISGLQSEDEADYYCASYRSSANAVFGGGTHLTVLG

SEQ ID NO: 1120 - protein, 122 aa, Artificial Sequence; identical to SEQ ID NO: 1074
  synthetic polypeptide

SEQ ID NO: 1121 - protein, 111 aa, Artificial Sequence
  synthetic polypeptide
QAVVTQEPSLTVSPGGTVTLTCGLKSGSVTSTNFPTWYQQTPGQAPRLLIYNTNTRHSGVPSRFSGSISENKAALTITGAQPEDEAEYFCALFISNPSVEFGGGTQLTVLS

SEQ ID NO: 1122 - protein, 122 aa, Artificial Sequence
  synthetic polypeptide
EVQLVESGGGLVQPGGSLRLSCAASGFTFSVYYMNWVRQAPGKGLEWVSDINNEGGTTYYADSVKGRFTISRDNSKNTLTLQMNSLKPEDTAVYYCVRDAGYSNHVPIFDSWGQGTQVIVSS

SEQ ID NO: 1123 - protein, 111 aa, Artificial Sequence
  synthetic polypeptide
QTVVTQEPSFSVSPGGTVTLTCGLKSGSVTSDNFPTWYQQTPGQAPRLLIYNTNTRHSGVPDRFSGSILGNKAALTITGAQADDESDYFCALFISNPSVEFGGGTQLTVLG

SEQ ID NO: 1124 - protein, 122 aa, Artificial Sequence
  synthetic polypeptide
EVQLVESGGGLVQPGGSLRLSCAASGFTFSVYYMNWVRQAPGKGLEWVSDINNEGGTTYYADSVKGRFTISRDNAKNTLTLQMNSLKPEDTAVYYCVRDAGYSNHVPIFDSWGQGTQVTVAS

SEQ ID NO: 1125 - protein, 111 aa, Artificial Sequence
  synthetic polypeptide
QAVVTQEPSFSVSPGGTVTLTCGLKSGSVTSDNFPTWYQQTPGQAPRLLIYNTNTRHSGVPDRFSGSILGNKAALTITGAQADDESDYFCALFISNPSVEFGGGTQLTVLG

SEQ ID NO: 1126 - protein, 122 aa, Artificial Sequence
  synthetic polypeptide
EVQLVESGGGLVQPGGSLRLSCAASGFTFSVYYMNWVRQAPGKGLEWVSDINNEGGTTYYADSVKGRFTISRDNAKNTLYLQMNSLKPEDTALYYCVRDAGYSNHVPIFDSWGQGTTVTVSS

SEQ ID NO: 1127 - protein, 111 aa, Artificial Sequence
  synthetic polypeptide
QTVVTQEPSLTVSPGGTVTLTCGLKSGSVTSTNFPTWYQQTPGQAPRLLIYNTNSRHSGVPDRFSGSILGNKAALTITGAQADDESDYFCALFISNPSVEFGGGTQLTVLG

SEQ ID NO: 1128 - protein, 122 aa, Artificial Sequence
  synthetic polypeptide
EVQLVESGGGLVQPGGSLRLSCAASGFTFSVYYMNWVRQAPGKGLEWVSDINNEGGTTYYADSVKGRFTISRDNAKNTLYLQMNSLKPEDTAVYYCVRDAGYSNHVPIFDSWGQGTTVIVSS

SEQ ID NO: 1129 - protein, 111 aa, Artificial Sequence
  synthetic polypeptide
QTVVTQEPSFSVSPGGTVTLTCGLTSGSVTSTNFPTWYQQTPGQAPRLLIYNTNSRHSGVPSRFSGSILGNKAALTITGAQADDESDYFCALFISNPSVEFGGGTQLTVLG

SEQ ID NO: 1130 - protein, 122 aa, Artificial Sequence
  synthetic polypeptide
EVQLVESGGGLVQPGGSLRLSCAASGFTFSVYYMNWVRQAPGKGLEWVSDINNEGGTTYYADSVKGRFTISRDNSKNSLTLQMNSLKPEDTAVYYCARDAGYSNHVPIFDSWGQGTLVTVSS

SEQ ID NO: 1131 - protein, 111 aa, Artificial Sequence
  synthetic polypeptide
QAVVTQEPSFSVSPGGTVTLTCGLKSGSVTSDNFPTWYQQTPGQAPRLLIYNTNSRHSGVPDRFSGSILGNKAALTIRGAQADDEAEYYCALFISNPSVEFGGGTQLTVLG

SEQ ID NO: 1132 - protein, 122 aa, Artificial Sequence; identical to SEQ ID NO: 1130
  synthetic polypeptide

SEQ ID NO: 1133 - protein, 111 aa, Artificial Sequence
  synthetic polypeptide
QTVVTQEPSFSVSPGGTVTLTCGLKSGSVTSDNFPTWYQQTPGQAPRLLIYNTNSRHSGVPDRFSGSILGNKAALTIRGAQADDEAEYYCALFISNPSVEFGGGTQLTVLG

SEQ ID NO: 1134 - protein, 122 aa, Artificial Sequence
  synthetic polypeptide
EVQLVESGGGLVQPGGSLRLSCASSGFTFSVYYMNWVRQAPGKGLEWVSDINNEGGTTYYADSVKGRFTISRDNSKNTLYLQMNSLRAEDTAVYYCVRDAGYSNHVPIFDSWGQGTTVTVAS

SEQ ID NO: 1135 - protein, 111 aa, Artificial Sequence
  synthetic polypeptide
QTVVTQEPSFSVSPGGTVTLTCGLTSGSVTSDNFPTWYQQTPGQAPRLLIYNTNSRHSGVPDRFSGSILGNKAALTITGAQPEDESDYFCALFISNPSVEFGGGTQLTVLG

SEQ ID NO: 1136 - protein, 122 aa, Artificial Sequence
  synthetic polypeptide
EVQLVESGGGLVQPGGSLRLSCAASGFTFSVYYMNWVRQAPGKGLEWVSDINNEGGTTYYADSVKGRFTISRDNAKNSLTLQMNSLRAEDTAVYYCVRDAGYSNHVPIFDSWGQGTQVTVSS

SEQ ID NO: 1137 - protein, 111 aa, Artificial Sequence
  synthetic polypeptide
QAVVTQEPSLTVSPGGTVTLTCGLKSGSVTSDNFPTWYQQTPGQAPRLLIYNTNTRHSGVPDRFSGSILGNKAALTITGAQPEDESDYYCALFISNPSVEFGGGTQLTVLG

SEQ ID NO: 1138 - protein, 122 aa, Artificial Sequence
  synthetic polypeptide
EVQLVESGGGLVQPGGSLRLSCAASGFTFSGYYMNWVRQAPGKGLEWVSDINNEGGTTYYADSVKGRFTISRDNAKNTLYLQMNSLRAEDTAVYYCVRDAGYSNHVPIFDSWGQGTTVTVAS

SEQ ID NO: 1139 - protein, 111 aa, Artificial Sequence
  synthetic polypeptide
QTVVTQEPSLTVSPGGTVTLTCGVTSGSVTSDNFPTWYQQTPGQAPRLLIYNTNTRHSGVPDRFSGSILGNKAALTITGAQPEDESDYYCALFISNPSVEFGGGTQLTVLG

SEQ ID NO: 1140 - protein, 122 aa, Artificial Sequence
  synthetic polypeptide
EVQLVESGGGLVQPGGSLRLSCAASGFTFSVYYMNWVRQAPGKGLEWVSDINNEGGTTYYADSVKGRFTISRDNSKNTLYLQMNSLRAEDTAVYYCVRDAGYSNHVPIFDSWGQGTQVTVSS

SEQ ID NO: 1141 - protein, 111 aa, Artificial Sequence
  synthetic polypeptide
QAVVTQEPSFSVSPGGTVTLTCGLTSGSVTSTNFPTWYQQTPGQAPRLLIYNTNTRHSGVPSRFSGSILGNKAALTITGAQADDEAEYFCALFISNPSVEFGGGTQLTVLG

SEQ ID NO: 1142 - protein, 122 aa, Artificial Sequence
  synthetic polypeptide
EVQLVESGGGLVQPGGSVRLSCAASGFTFSVYYMNWVRQAPGKGLEWVSDINNEGGTTYYADSVKGRFTISRDNAKNTLYLQMNSLKPEDTAVYYCARDAGYSNHVPIFDSWGQGTLVTVAS

SEQ ID NO: 1143 - protein, 111 aa, Artificial Sequence
  synthetic polypeptide
QTVVTQEPSFSVSPGGTVTLTCGLKSGSVTSDNFPTWYQQTPGQAPRLLIYNTNSRHSGVPDRFSGSILGNKAALTITGAQADDESDYFCALFISNPSVEFGGGTQLTVLG

SEQ ID NO: 1144 - protein, 122 aa, Artificial Sequence
  synthetic polypeptide
EVQLVESGGGLVQPGGSLRLSCAASGFTFSVYYMNWVRQAPGKGLEWVSDINNEGGTTYYADSVKGRFTISRDNSKNSLYLQMNSLRAEDTAVYYCARDAGYSNHVPIFDSWGQGTLVTVSS

SEQ ID NO: 1145 - protein, 111 aa, Artificial Sequence
  synthetic polypeptide
QAVVTQEPSLTVSPGGTVTLTCGLKSGSVTSDNFPTWYQQTPGQAPRLLIYNTNTRHSGVPDRFSGSILGNKAALTITGAQADDEAEYFCALFISNPSVEFGGGTQLTVLG

SEQ ID NO: 1146 - protein, 122 aa, Artificial Sequence
  synthetic polypeptide
EVQLVESGGGLVQPGGSLRLSCAASGFTFSVYYMNWVRQAPGKGLEWVSDINNEGGTTYYADSVKGRFTISRDNSKNTLYLQMNSLRAEDTAVYYCARDAGYSNHVPIFDSWGQGTQVTVAS

SEQ ID NO: 1147 - protein, 111 aa, Artificial Sequence
  synthetic polypeptide
QAVVTQEPSFSVSPGGTVTLTCGLTSGSVTSTNFPTWYQQTPGQAPRLLIYNTNSRHSGVPDRFSGSILGNKAALTITGAQPEDESDYFCALFISNPSVEFGGGTQLTVLG

SEQ ID NO: 1148 - protein, 122 aa, Artificial Sequence
  synthetic polypeptide
EVQLVESGGGLVQPGGSLRLSCAASGFTFSVYYMNWVRQAPGKGLEWVSDINNEGGTTYYADSVKGRFTISRDNAKNTLYLQMNSLKPEDTAVYYCARDAGYSNHVPIFDSWGQGTLVTVSS

SEQ ID NO: 1149 - protein, 111 aa, Artificial Sequence
  synthetic polypeptide
QTVVTQEPSFSVSPGGTVTLTCGLKSGSVTSTNFPTWYQQTPGQAPRLLIYNTNSRHSGVPDRFSGSILGNKAALTITGAQADDEADYFCALFISNPSVEFGGGTQLTVLG

SEQ ID NO: 1150 - protein, 122 aa, Artificial Sequence
  synthetic polypeptide
EVQLVESGGGLVQPGGSLRLSCAASGFTFSVYYMNWVRQAPGKGLEWVSDINNEGGATYYADSVKGRFTISRDNSKNSLYLQMNSLRAEDTAVYYCARDAGYSNHVPIFDSWGQGTQVTVSS

SEQ ID NO: 1151 - protein, 111 aa, Artificial Sequence
  synthetic polypeptide
QAVVTQEPSFSVSPGGTVTLTCGLKSGSVTSDNFPTWYQQTPGQAPRLLIYNTNTRHSGVPDRFSGSILGNKAALTITGAQADDEAEYFCALFISNPSVEFGGGTQLTVLG

SEQ ID NO: 1152 - protein, 122 aa, Artificial Sequence; identical to SEQ ID NO: 1150
  synthetic polypeptide

SEQ ID NO: 1153 - protein, 111 aa, Artificial Sequence
  synthetic polypeptide
QTVVTQEPSFSVSPGGTVTLTCGLKSGSVTSDNFPTWYQQTPGQAPRLLIYNTNTRHSGVPDRFSGSILGNKAALTITGAQADDEAEYFCALFISNPSVEFGGGTQLTVLG

SEQ ID NO: 1154 - protein, 122 aa, Artificial Sequence
  synthetic polypeptide
EVQLVASGGGLVQPGGSLRLSCAASGFTFSVYYMNWVRQAPGKGLEWVSDINNEGGTTYYADSVKGRFTISRDNSKNTLYLQMNSLRAEDTAVYYCARDAGYSNHVPIFDSWGQGTTVTVSS

SEQ ID NO: 1155 - protein, 111 aa, Artificial Sequence
  synthetic polypeptide
QAVVTQEPSFSVSPGGTVTLTCGLKSGSVTSDNFPTWYQQTPGQAPRLLIYNTNTRHSGVPSRFSGSILGNKAALTITGAQADDESDYYCALFISNPSVEFGGGTQLTVLG

SEQ ID NO: 1156 - protein, 122 aa, Artificial Sequence; identical to SEQ ID NO: 1154
  synthetic polypeptide

SEQ ID NO: 1157 - protein, 111 aa, Artificial Sequence
  synthetic polypeptide
QTVVTQEPSFSVSPGGTVTLTCGLKSGSVTSDNFPTWYQQTPGQAPRLLIYNTNTRHSGVPSRFSGSILGNKAALTITGAQADDESDYYCALFISNPSVEFGGGTQLTVLG

SEQ ID NO: 1158 - protein, 122 aa, Artificial Sequence; identical to SEQ ID NO: 1144
  synthetic polypeptide

SEQ ID NO: 1159 - protein, 111 aa, Artificial Sequence; identical to SEQ ID NO: 1151
  synthetic polypeptide

SEQ ID NO: 1160 - protein, 122 aa, Artificial Sequence; identical to SEQ ID NO: 1144
  synthetic polypeptide

SEQ ID NO: 1161 - protein, 111 aa, Artificial Sequence; identical to SEQ ID NO: 1153
  synthetic polypeptide

SEQ ID NO: 1162 - protein, 122 aa, Artificial Sequence; identical to SEQ ID NO: 1144
  synthetic polypeptide

SEQ ID NO: 1163 - protein, 111 aa, Artificial Sequence; identical to SEQ ID NO: 1145
  synthetic polypeptide

SEQ ID NO: 1164 - protein, 118 aa, Artificial Sequence; identical to SEQ ID NO: 694
  synthetic polypeptide

SEQ ID NO: 1165 - protein, 111 aa, Artificial Sequence
  synthetic polypeptide
DIVMTQSPDSLAVSLGERATINCRASKSVSTSGYSFMHWYQQKPGQPPKLLIYLASNLESGVPDRFSGSGSGTDFTLTISSLQAEDVAVYYCQHSREVPWTFGQGTKVEIK

SEQ ID NO: 1166 - protein, 118 aa, Artificial Sequence; identical to SEQ ID NO: 694
  synthetic polypeptide

SEQ ID NO: 1167 - protein, 111 aa, Artificial Sequence; identical to SEQ ID NO: 1165
  synthetic polypeptide

SEQ ID NO: 1168 - protein, 118 aa, Artificial Sequence; identical to SEQ ID NO: 74
  synthetic polypeptide

SEQ ID NO: 1169 - protein, 111 aa, Artificial Sequence; identical to SEQ ID NO: 1165
  synthetic polypeptide

SEQ ID NO: 1170 - protein, 5 aa, Artificial Sequence
  synthetic polypeptide
TYGMH

SEQ ID NO: 1171 - protein, 17 aa, Artificial Sequence
  synthetic polypeptide
VIWYDGSNKYYGDSVKG

SEQ ID NO: 1172 - protein, 11 aa, Artificial Sequence
  synthetic polypeptide
DNSHYYYGMDV

SEQ ID NO: 1173 - protein, 5 aa, Artificial Sequence
  synthetic polypeptide
SYGMH

SEQ ID NO: 1174 - protein, 17 aa, Artificial Sequence
  synthetic polypeptide
VIWYDGSDKYFADSVKG

SEQ ID NO: 1175 - protein, 13 aa, Artificial Sequence
  synthetic polypeptide
DGIAGARYVYFDY

SEQ ID NO: 1176 - protein, 5 aa, Artificial Sequence
  synthetic polypeptide
SYGMH

SEQ ID NO: 1177 - protein, 17 aa, Artificial Sequence
  synthetic polypeptide
VTWYDGSNKYYGDSVKG

SEQ ID NO: 1178 - protein, 13 aa, Artificial Sequence
  synthetic polypeptide
DLLRGVKGYAMDV

SEQ ID NO: 1179 - protein, 5 aa, Artificial Sequence
  synthetic polypeptide
SYGIS

SEQ ID NO: 1180 - protein, 17 aa, Artificial Sequence
  synthetic polypeptide
WISAYNGYTHYAQKLQG

SEQ ID NO: 1181 - protein, 12 aa, Artificial Sequence
  synthetic polypeptide
DYGGNDYYGMDV

SEQ ID NO: 1182 - protein, 7 aa, Artificial Sequence
  synthetic polypeptide
SGGYYWS

SEQ ID NO: 1183 - protein, 16 aa, Artificial Sequence
  synthetic polypeptide
YIFYSGSTDYNPSLKS

SEQ ID NO: 1184 - protein, 10 aa, Artificial Sequence
  synthetic polypeptide
SGYSYALFDH

SEQ ID NO: 1185 - protein, 7 aa, Artificial Sequence
  synthetic polypeptide
SGGYYWS

SEQ ID NO: 1186 - protein, 16 aa, Artificial Sequence
  synthetic polypeptide
YIFYSGSTDYNPSLKS

SEQ ID NO: 1187 - protein, 10 aa, Artificial Sequence
  synthetic polypeptide
SGYSYALFDH

SEQ ID NO: 1188 - protein, 5 aa, Artificial Sequence
  synthetic polypeptide
SYYLH

SEQ ID NO: 1189 - protein, 17 aa, Artificial Sequence
  synthetic polypeptide
IVDPSGGSTSYDQKFQG

SEQ ID NO: 1190 - protein, 9 aa, Artificial Sequence
  synthetic polypeptide
DYGDYVFDY

SEQ ID NO: 1191 - protein, 5 aa, Artificial Sequence
  synthetic polypeptide
SYGMH

SEQ ID NO: 1192 - protein, 17 aa, Artificial Sequence
  synthetic polypeptide
VIWYDGSDKYFADSVKG

SEQ ID NO: 1193 - protein, 13 aa, Artificial Sequence
  synthetic polypeptide
DGIAGARYVYFDY

SEQ ID NO: 1194 - protein, 5 aa, Artificial Sequence
  synthetic polypeptide
SYGIS

SEQ ID NO: 1195 - protein, 17 aa, Artificial Sequence
  synthetic polypeptide
WISAYNGYTHYAQKLQG

SEQ ID NO: 1196 - protein, 12 aa, Artificial Sequence
  synthetic polypeptide
DYGGNDYYGMDV

SEQ ID NO: 1197 - protein, 7 aa, Artificial Sequence
  synthetic polypeptide
SGGYYWS

SEQ ID NO: 1198 - protein, 16 aa, Artificial Sequence
  synthetic polypeptide
YIFYSGSTDYNPSLKS

SEQ ID NO: 1199 - protein, 10 aa, Artificial Sequence
  synthetic polypeptide
SGYSYALFDH

SEQ ID NO: 1200 - protein, 5 aa, Artificial Sequence
  synthetic polypeptide
TYGMH

SEQ ID NO: 1201 - protein, 17 aa, Artificial Sequence
  synthetic polypeptide
VIWYDGSNKYYGDSVKG

SEQ ID NO: 1202 - protein, 11 aa, Artificial Sequence
  synthetic polypeptide
DNSHYYYGMDV

SEQ ID NO: 1203 - protein, 5 aa, Artificial Sequence
  synthetic polypeptide
YYGMH

SEQ ID NO: 1204 - protein, 17 aa, Artificial Sequence
  synthetic polypeptide
VIWYDGSNKYYADSVKG

SEQ ID NO: 1205 - protein, 12 aa, Artificial Sequence
  synthetic polypeptide
DREMGSRGDFDY

SEQ ID NO: 1206 - protein, 5 aa, Artificial Sequence
  synthetic polypeptide
SYAMS

SEQ ID NO: 1207 - protein, 17 aa, Artificial Sequence
  synthetic polypeptide
VISGSGGRPNYADSVKG

SEQ ID NO: 1208 - protein, 11 aa, Artificial Sequence
  synthetic polypeptide
VDYSNYLFFDY

SEQ ID NO: 1209 - protein, 5 aa, Artificial Sequence
  synthetic polypeptide
IYAMS

SEQ ID NO: 1210 - protein, 17 aa, Artificial Sequence
  synthetic polypeptide
AISGSGGSTFYADSVKG

SEQ ID NO: 1211 - protein, 11 aa, Artificial Sequence
  synthetic polypeptide
HDYSNYPYFDY

SEQ ID NO: 1212 - protein, 5 aa, Artificial Sequence
  synthetic polypeptide
SYAMS

SEQ ID NO: 1213 - protein, 17 aa, Artificial Sequence
  synthetic polypeptide
AISGSGGRTFYADSVEG

SEQ ID NO: 1214 - protein, 11 aa, Artificial Sequence
  synthetic polypeptide
HDYSNYPYFDY

SEQ ID NO: 1215 - protein, 5 aa, Artificial Sequence
  synthetic polypeptide
SYAMS

SEQ ID NO: 1216 - protein, 17 aa, Artificial Sequence
  synthetic polypeptide
AISGSGGRTFYADSVEG

SEQ ID NO: 1217 - protein, 11 aa, Artificial Sequence
  synthetic polypeptide
HDYSNYPYFDY

SEQ ID NO: 1218 - protein, 5 aa, Artificial Sequence
  synthetic polypeptide
SYAMS

SEQ ID NO: 1219 - protein, 17 aa, Artificial Sequence
  synthetic polypeptide
AISGSGGRTHYADSVKG

SEQ ID NO: 1220 - protein, 11 aa, Artificial Sequence
  synthetic polypeptide
HDYSNYPYFDY

SEQ ID NO: 1221 - protein, 5 aa, Artificial Sequence
  synthetic polypeptide
SYAMS

SEQ ID NO: 1222 - protein, 17 aa, Artificial Sequence
  synthetic polypeptide
LISGSGGRTHYADSVKG

SEQ ID NO: 1223 - protein, 11 aa, Artificial Sequence
  synthetic polypeptide
HDYSNYPYFDY

SEQ ID NO: 1224 - protein, 5 aa, Artificial Sequence
  synthetic polypeptide
TYAMS

SEQ ID NO: 1225 - protein, 17 aa, Artificial Sequence
  synthetic polypeptide
AISGSGGSTFYADSVKG

SEQ ID NO: 1226 - protein, 11 aa, Artificial Sequence
  synthetic polypeptide
HDYSNYPYFDY

SEQ ID NO: 1227 - protein, 5 aa, Artificial Sequence
  synthetic polypeptide
TYAMS

SEQ ID NO: 1228 - protein, 17 aa, Artificial Sequence
  synthetic polypeptide
LISGSGGRTYYADSVKG

SEQ ID NO: 1229 - protein, 11 aa, Artificial Sequence
  synthetic polypeptide
HDYSNYPYFDY

SEQ ID NO: 1230 - protein, 5 aa, Artificial Sequence
  synthetic polypeptide
TYAMS

SEQ ID NO: 1231 - protein, 17 aa, Artificial Sequence
  synthetic polypeptide
AISGSGGRTFYADSVEG

SEQ ID NO: 1232 - protein, 11 aa, Artificial Sequence
  synthetic polypeptide
HDYSNYPYFDY

SEQ ID NO: 1233 - protein, 5 aa, Artificial Sequence
  synthetic polypeptide
SYAMS

SEQ ID NO: 1234 - protein, 17 aa, Artificial Sequence
  synthetic polypeptide
AISGSGGYTYYADSVKG

SEQ ID NO: 1235 - protein, 11 aa, Artificial Sequence
  synthetic polypeptide
HDYSNYPYFDY

SEQ ID NO: 1236 - protein, 5 aa, Artificial Sequence
  synthetic polypeptide
VYAMS

SEQ ID NO: 1237 - protein, 17 aa, Artificial Sequence
  synthetic polypeptide
TISDSGGSTFYADSVKG

SEQ ID NO: 1238 - protein, 11 aa, Artificial Sequence
  synthetic polypeptide
HDYSNYAYFDY

SEQ ID NO: 1239 - protein, 5 aa, Artificial Sequence
  synthetic polypeptide
SYAMS

SEQ ID NO: 1240 - protein, 17 aa, Artificial Sequence
  synthetic polypeptide
AISGSGGSTFYADSVKG

SEQ ID NO: 1241 - protein, 11 aa, Artificial Sequence
  synthetic polypeptide
HDYSNYPYFDY

SEQ ID NO: 1242 - protein, 5 aa, Artificial Sequence
  synthetic polypeptide
SYAMS

SEQ ID NO: 1243 - protein, 17 aa, Artificial Sequence
  synthetic polypeptide
AISGSGGRTFYADSVEG

SEQ ID NO: 1244 - protein, 11 aa, Artificial Sequence
  synthetic polypeptide
HDYSNYPYFDY

SEQ ID NO: 1245 - protein, 5 aa, Artificial Sequence
  synthetic polypeptide
SYAMS

SEQ ID NO: 1246 - protein, 17 aa, Artificial Sequence
  synthetic polypeptide
AISGSGGRTFYADSVEG

SEQ ID NO: 1247 - protein, 11 aa, Artificial Sequence
  synthetic polypeptide
HDYSNYPYFDY

SEQ ID NO: 1248 - protein, 5 aa, Artificial Sequence
  synthetic polypeptide
TYAMS

SEQ ID NO: 1249 - protein, 17 aa, Artificial Sequence
  synthetic polypeptide
AISGSGGGTFYADSVKG

SEQ ID NO: 1250 - protein, 11 aa, Artificial Sequence
  synthetic polypeptide
HDYSNYPYFDY

SEQ ID NO: 1251 - protein, 5 aa, Artificial Sequence
  synthetic polypeptide
TYAMS

SEQ ID NO: 1252 - protein, 17 aa, Artificial Sequence
  synthetic polypeptide
LISGSGGRTYYADSVKG

SEQ ID NO: 1253 - protein, 11 aa, Artificial Sequence
  synthetic polypeptide
HDYSNYPYFDY

SEQ ID NO: 1254 - protein, 5 aa, Artificial Sequence
  synthetic polypeptide
SYAMS

SEQ ID NO: 1255 - protein, 17 aa, Artificial Sequence
  synthetic polypeptide
VISGSGGRTHYADSGKG

SEQ ID NO: 1256 - protein, 11 aa, Artificial Sequence
  synthetic polypeptide
HDYSNYPYFDY

SEQ ID NO: 1257 - protein, 5 aa, Artificial Sequence
  synthetic polypeptide
TYAMS

SEQ ID NO: 1258 - protein, 17 aa, Artificial Sequence
  synthetic polypeptide
LISGSGGRTYYADSVKG

SEQ ID NO: 1259 - protein, 11 aa, Artificial Sequence
  synthetic polypeptide
HDYSNYPYFDY

SEQ ID NO: 1260 - protein, 5 aa, Artificial Sequence
  synthetic polypeptide
SYAMS

SEQ ID NO: 1261 - protein, 17 aa, Artificial Sequence
  synthetic polypeptide
AISGSGGRAQYADSVQG

SEQ ID NO: 1262 - protein, 11 aa, Artificial Sequence
  synthetic polypeptide
HDYSNYPYFDY

SEQ ID NO: 1263 - protein, 5 aa, Artificial Sequence
  synthetic polypeptide
SYAMS

SEQ ID NO: 1264 - protein, 17 aa, Artificial Sequence
  synthetic polypeptide
AISGSGGRTFYADSVEG

SEQ ID NO: 1265 - protein, 11 aa, Artificial Sequence
  synthetic polypeptide
HDYSNYPYFDY

SEQ ID NO: 1266 - protein, 5 aa, Artificial Sequence
  synthetic polypeptide
TYAMS

SEQ ID NO: 1267 - protein, 17 aa, Artificial Sequence
  synthetic polypeptide
TISDSGGSTFYADSVMG

SEQ ID NO: 1268 - protein, 11 aa, Artificial Sequence
  synthetic polypeptide
HDYSNYAFFDY

SEQ ID NO: 1269 - protein, 5 aa, Artificial Sequence
  synthetic polypeptide
TYAMS

SEQ ID NO: 1270 - protein, 17 aa, Artificial Sequence
  synthetic polypeptide
TISDSGGSTFYADSVMG

SEQ ID NO: 1271 - protein, 11 aa, Artificial Sequence
  synthetic polypeptide
HDYSNYAFFDY

SEQ ID NO: 1272 - protein, 5 aa, Artificial Sequence
  synthetic polypeptide
TYAMS

SEQ ID NO: 1273 - protein, 17 aa, Artificial Sequence
  synthetic polypeptide
AISGSGGYTYYADSVEG

SEQ ID NO: 1274 - protein, 11 aa, Artificial Sequence
  synthetic polypeptide
HDYSNYAWFDP

SEQ ID NO: 1275 - protein, 5 aa, Artificial Sequence
  synthetic polypeptide
SYAMS

SEQ ID NO: 1276 - protein, 17 aa, Artificial Sequence
  synthetic polypeptide
AISGSGGRTYYADSVKG

SEQ ID NO: 1277 - protein, 11 aa, Artificial Sequence
  synthetic polypeptide
HDYSNYPYFDY

SEQ ID NO: 1278 - protein, 5 aa, Artificial Sequence
  synthetic polypeptide
SYAMS

SEQ ID NO: 1279 - protein, 17 aa, Artificial Sequence
  synthetic polypeptide
AIGDGGGYTYYADSVKG

SEQ ID NO: 1280 - protein, 11 aa, Artificial Sequence
  synthetic polypeptide
HDYSNYPYFDY

SEQ ID NO: 1281 - protein, 5 aa, Artificial Sequence
  synthetic polypeptide
SYAMS

SEQ ID NO: 1282 - protein, 17 aa, Artificial Sequence
  synthetic polypeptide
AISGSGGRTFYADSVEG

SEQ ID NO: 1283 - protein, 11 aa, Artificial Sequence
  synthetic polypeptide
HDYSNYPYFDY

SEQ ID NO: 1284 - protein, 5 aa, Artificial Sequence
  synthetic polypeptide
SYAMS

SEQ ID NO: 1285 - protein, 17 aa, Artificial Sequence
  synthetic polypeptide
AISGSGGGTFYADSVEG

SEQ ID NO: 1286 - protein, 11 aa, Artificial Sequence
  synthetic polypeptide
HDYSNYPYFDY

SEQ ID NO: 1287 - protein, 5 aa, Artificial Sequence
  synthetic polypeptide
SYAMS

SEQ ID NO: 1288 - protein, 17 aa, Artificial Sequence
  synthetic polypeptide
AISGSGGRTFYADSVEG

SEQ ID NO: 1289 - protein, 11 aa, Artificial Sequence
  synthetic polypeptide
HDYSNYPYFDY

SEQ ID NO: 1290 - protein, 5 aa, Artificial Sequence
  synthetic polypeptide
SYAMS

SEQ ID NO: 1291 - protein, 17 aa, Artificial Sequence
  synthetic polypeptide
AISGSGGRTFYADSVEG

SEQ ID NO: 1292 - protein, 11 aa, Artificial Sequence
  synthetic polypeptide
HDYSNYPYFDY

SEQ ID NO: 1293 - protein, 5 aa, Artificial Sequence
  synthetic polypeptide
TYAMS

SEQ ID NO: 1294 - protein, 17 aa, Artificial Sequence
  synthetic polypeptide
LISGSGGRTYYADSVKG

SEQ ID NO: 1295 - protein, 11 aa, Artificial Sequence
  synthetic polypeptide
HDYSNYPYFDY

SEQ ID NO: 1296 - protein, 5 aa, Artificial Sequence
  synthetic polypeptide
SYAMS

SEQ ID NO: 1297 - protein, 17 aa, Artificial Sequence
  synthetic polypeptide
AISGSGGRTFYADSVEG

SEQ ID NO: 1298 - protein, 11 aa, Artificial Sequence
  synthetic polypeptide
HDYSNYPYFDY

SEQ ID NO: 1299 - protein, 5 aa, Artificial Sequence
  synthetic polypeptide
SYAMS

SEQ ID NO: 1300 - protein, 17 aa, Artificial Sequence
  synthetic polypeptide
VISDSGGITDFADSVKG

SEQ ID NO: 1301 - protein, 11 aa, Artificial Sequence
  synthetic polypeptide
HDYSNYFFFDY

SEQ ID NO: 1302 - protein, 5 aa, Artificial Sequence
  synthetic polypeptide
SYAMS

SEQ ID NO: 1303 - protein, 17 aa, Artificial Sequence
  synthetic polypeptide
VISDSGGITDFADSVKG

SEQ ID NO: 1304 - protein, 11 aa, Artificial Sequence
  synthetic polypeptide
HDYSNYFFFDY

SEQ ID NO: 1305 - protein, 5 aa, Artificial Sequence
  synthetic polypeptide
SYAMS

SEQ ID NO: 1306 - protein, 17 aa, Artificial Sequence
  synthetic polypeptide
VISGSGGRTDYADSVKG

SEQ ID NO: 1307 - protein, 11 aa, Artificial Sequence
  synthetic polypeptide
HDYSNRFYFDY

SEQ ID NO: 1308 - protein, 5 aa, Artificial Sequence
  synthetic polypeptide
SYAMS

SEQ ID NO: 1309 - protein, 17 aa, Artificial Sequence
  synthetic polypeptide
VISDSGGITDYADSVKG

SEQ ID NO: 1310 - protein, 11 aa, Artificial Sequence
  synthetic polypeptide
HDYSNRYYFDY

SEQ ID NO: 1311 - protein, 5 aa, Artificial Sequence
  synthetic polypeptide
SYAMS

SEQ ID NO: 1312 - protein, 17 aa, Artificial Sequence
  synthetic polypeptide
VISDSGGITDFADSVKG

SEQ ID NO: 1313 - protein, 11 aa, Artificial Sequence
  synthetic polypeptide
HDYSNYFFFDY

SEQ ID NO: 1314 - protein, 5 aa, Artificial Sequence
  synthetic polypeptide
SYAMS

SEQ ID NO: 1315 - protein, 17 aa, Artificial Sequence
  synthetic polypeptide
VISDSGGITDFADSVKG

SEQ ID NO: 1316 - protein, 11 aa, Artificial Sequence
  synthetic polypeptide
HDYSNYFFFDY

SEQ ID NO: 1317 - protein, 5 aa, Artificial Sequence
  synthetic polypeptide
TYAMS

SEQ ID NO: 1318 - protein, 17 aa, Artificial Sequence
  synthetic polypeptide
AISGSGGYTYYADSVEG

SEQ ID NO: 1319 - protein, 11 aa, Artificial Sequence
  synthetic polypeptide
HDYSNYAWFDP

SEQ ID NO: 1320 - protein, 7 aa, Artificial Sequence
  synthetic polypeptide
TDGYYWS

SEQ ID NO: 1321 - protein, 16 aa, Artificial Sequence
  synthetic polypeptide
YIYYSGSTNYNPSLKS

SEQ ID NO: 1322 - protein, 8 aa, Artificial Sequence
  synthetic polypeptide
GIGLGFEY

SEQ ID NO: 1323 - protein, 7 aa, Artificial Sequence
  synthetic polypeptide
TDGYYWS

SEQ ID NO: 1324 - protein, 16 aa, Artificial Sequence
  synthetic polypeptide
YIYYSGSTNYNPSLKS

SEQ ID NO: 1325 - protein, 8 aa, Artificial Sequence
  synthetic polypeptide
GIGLGFEY

SEQ ID NO: 1326 - protein, 5 aa, Artificial Sequence
  synthetic polypeptide
SYAMS

SEQ ID NO: 1327 - protein, 17 aa, Artificial Sequence
  synthetic polypeptide
AISGSGGRTFYADSVEG

SEQ ID NO: 1328 - protein, 11 aa, Artificial Sequence
  synthetic polypeptide
HDYSNYPYFDY

SEQ ID NO: 1329 - protein, 5 aa, Artificial Sequence
  synthetic polypeptide
IYAMS

SEQ ID NO: 1330 - protein, 17 aa, Artificial Sequence
  synthetic polypeptide
AIGDSGGSTFYADSVKG

SEQ ID NO: 1331 - protein, 11 aa, Artificial Sequence
  synthetic polypeptide
HDYSNYPYFDY

SEQ ID NO: 1332 - protein, 5 aa, Artificial Sequence
  synthetic polypeptide
SYGMH

SEQ ID NO: 1333 - protein, 17 aa, Artificial Sequence
  synthetic polypeptide
VISYDGSNKYYADSVKG

SEQ ID NO: 1334 - protein, 15 aa, Artificial Sequence
  synthetic polypeptide
GRYYGSGNYNHGMDV

SEQ ID NO: 1335 - protein, 5 aa, Artificial Sequence
  synthetic polypeptide
SYGMH

SEQ ID NO: 1336 - protein, 17 aa, Artificial Sequence
  synthetic polypeptide
VISYDGSNKYYADSVKG

SEQ ID NO: 1337 - protein, 15 aa, Artificial Sequence
  synthetic polypeptide
GRYYGSGSYNYGMDV

SEQ ID NO: 1338 - protein, 5 aa, Artificial Sequence
  synthetic polypeptide
SYGMH

SEQ ID NO: 1339 - protein, 17 aa, Artificial Sequence
  synthetic polypeptide
VIWYDGSSEYYADSVKG

SEQ ID NO: 1340 - protein, 11 aa, Artificial Sequence
  synthetic polypeptide
DNSYNYYGMDV

SEQ ID NO: 1341 - protein, 7 aa, Artificial Sequence
  synthetic polypeptide
SSSYYWG

SEQ ID NO: 1342 - protein, 16 aa, Artificial Sequence
  synthetic polypeptide
SIYHSGGTYFNPSLKS

SEQ ID NO: 1343 - protein, 15 aa, Artificial Sequence
  synthetic polypeptide
HYEILTGYYPDVFDI

SEQ ID NO: 1344 - protein, 5 aa, Artificial Sequence
  synthetic polypeptide
GFYWS

SEQ ID NO: 1345 - protein, 16 aa, Artificial Sequence
  synthetic polypeptide
EIDHSGSTNYNPSLKS

SEQ ID NO: 1346 - protein, 10 aa, Artificial Sequence
  synthetic polypeptide
NGYSGYLFDY

SEQ ID NO: 1347 - protein, 5 aa, Artificial Sequence
  synthetic polypeptide
TYYWS

SEQ ID NO: 1348 - protein, 16 aa, Artificial Sequence
  synthetic polypeptide
RIYPTGITNYNPSLKS

SEQ ID NO: 1349 - protein, 17 aa, Artificial Sequence
  synthetic polypeptide
DRRFLEPSYYYYYGMDV

SEQ ID NO: 1350 - protein, 5 aa, Artificial Sequence
  synthetic polypeptide
SYAMS

SEQ ID NO: 1351 - protein, 17 aa, Artificial Sequence
  synthetic polypeptide
VISDSGGITDFADSVKG

SEQ ID NO: 1352 - protein, 11 aa, Artificial Sequence
  synthetic polypeptide
HDYSNYFFFDY

SEQ ID NO: 1353 - protein, 5 aa, Artificial Sequence
  synthetic polypeptide
SYSMN

SEQ ID NO: 1354 - protein, 17 aa, Artificial Sequence
  synthetic polypeptide
YISSSGGYIYYADSVKG

SEQ ID NO: 1355 - protein, 11 aa, Artificial Sequence
  synthetic polypeptide
GDYSNYAYFDY

SEQ ID NO: 1356 - protein, 5 aa, Artificial Sequence
  synthetic polypeptide
TYTMN

SEQ ID NO: 1357 - protein, 17 aa, Artificial Sequence
  synthetic polypeptide
SISSSSGYIYYADSVKG

SEQ ID NO: 1358 - protein, 11 aa, Artificial Sequence
  synthetic polypeptide
GDYSNYLYFDL

SEQ ID NO: 1359 - protein, 5 aa, Artificial Sequence
  synthetic polypeptide
VYAMS

SEQ ID NO: 1360 - protein, 17 aa, Artificial Sequence
  synthetic polypeptide
TISDSGGSTFYADSVKG

SEQ ID NO: 1361 - protein, 11 aa, Artificial Sequence
  synthetic polypeptide
HDYSNYAYFDY

SEQ ID NO: 1362 - protein, 5 aa, Artificial Sequence
  synthetic polypeptide
TYAMS

SEQ ID NO: 1363 - protein, 17 aa, Artificial Sequence
  synthetic polypeptide
AISGSGGYTYYADSVEG

SEQ ID NO: 1364 - protein, 11 aa, Artificial Sequence
  synthetic polypeptide
HDYSNYAWFDP

SEQ ID NO: 1365 - protein, 5 aa, Artificial Sequence
  synthetic polypeptide
SYAMS

SEQ ID NO: 1366 - protein, 17 aa, Artificial Sequence
  synthetic polypeptide
AISGSGGRTYYADSVKG

SEQ ID NO: 1367 - protein, 11 aa, Artificial Sequence
  synthetic polypeptide
HDYSNYPYFDY

SEQ ID NO: 1368 - protein, 5 aa, Artificial Sequence
  synthetic polypeptide
SYAMS

SEQ ID NO: 1369 - protein, 17 aa, Artificial Sequence
  synthetic polypeptide
VISDSGGITDFADSVKG

SEQ ID NO: 1370 - protein, 11 aa, Artificial Sequence
  synthetic polypeptide
HDYSNYFFFDY

SEQ ID NO: 1371 - protein, 5 aa, Artificial Sequence
  synthetic polypeptide
SYAMS

SEQ ID NO: 1372 - protein, 17 aa, Artificial Sequence
  synthetic polypeptide
VISDSGGITDFADSVKG

SEQ ID NO: 1373 - protein, 11 aa, Artificial Sequence
  synthetic polypeptide
HDYSNYFFFDY

SEQ ID NO: 1374 - protein, 7 aa, Artificial Sequence
  synthetic polypeptide
TDGYYWS

SEQ ID NO: 1375 - protein, 16 aa, Artificial Sequence
  synthetic polypeptide
YIYYSGSTNYNPSLKS

SEQ ID NO: 1376 - protein, 8 aa, Artificial Sequence
  synthetic polypeptide
GIGLGFEY

SEQ ID NO: 1377 - protein, 5 aa, Artificial Sequence
  synthetic polypeptide
SYGMH

SEQ ID NO: 1378 - protein, 17 aa, Artificial Sequence
  synthetic polypeptide
VISYDGSNKYYADSVKG

SEQ ID NO: 1379 - protein, 15 aa, Artificial Sequence
  synthetic polypeptide
GRYYGSGNYNHGMDV

SEQ ID NO: 1380 - protein, 5 aa, Artificial Sequence
  synthetic polypeptide
SYGMH

SEQ ID NO: 1381 - protein, 17 aa, Artificial Sequence
  synthetic polypeptide
VISYDGSNKYYADSVKG

SEQ ID NO: 1382 - protein, 15 aa, Artificial Sequence
  synthetic polypeptide
GRYYGSGSYNYGMDV

SEQ ID NO: 1383 - protein, 5 aa, Artificial Sequence
  synthetic polypeptide
TYYWS

SEQ ID NO: 1384 - protein, 16 aa, Artificial Sequence
  synthetic polypeptide
RIYPTGITNYNPSLKS

SEQ ID NO: 1385 - protein, 17 aa, Artificial Sequence
  synthetic polypeptide
DRRFLEPSYYYYYGMDV

SEQ ID NO: 1386 - protein, 5 aa, Artificial Sequence
  synthetic polypeptide
SYSMN

SEQ ID NO: 1387 - protein, 17 aa, Artificial Sequence
  synthetic polypeptide
YISSSGGYIYYADSVKG

SEQ ID NO: 1388 - protein, 11 aa, Artificial Sequence
  synthetic polypeptide
GDYSNYAYFDY

SEQ ID NO: 1389 - protein, 5 aa, Artificial Sequence
  synthetic polypeptide
SYAMS

SEQ ID NO: 1390 - protein, 17 aa, Artificial Sequence
  synthetic polypeptide
AISGSGGSTFYADSVQG

SEQ ID NO: 1391 - protein, 11 aa, Artificial Sequence
  synthetic polypeptide
HDYSNYPYFDY

SEQ ID NO: 1392 - protein, 5 aa, Artificial Sequence
  synthetic polypeptide
SYAMS

SEQ ID NO: 1393 - protein, 17 aa, Artificial Sequence
  synthetic polypeptide
VISGSGGRPNYAESVKG

SEQ ID NO: 1394 - protein, 11 aa, Artificial Sequence
  synthetic polypeptide
VDYSNYLFFDY

SEQ ID NO: 1395 - protein, 5 aa, Artificial Sequence
  synthetic polypeptide
IYAMS

SEQ ID NO: 1396 - protein, 17 aa, Artificial Sequence
  synthetic polypeptide
AISGSGGSTFYAESVKG

SEQ ID NO: 1397 - protein, 11 aa, Artificial Sequence
  synthetic polypeptide
HDYSNYPYFDY

SEQ ID NO: 1398 - protein, 5 aa, Artificial Sequence
  synthetic polypeptide
SYAMS

SEQ ID NO: 1399 - protein, 17 aa, Artificial Sequence
  synthetic polypeptide
AISGSGGRTFYAESVEG

SEQ ID NO: 1400 - protein, 11 aa, Artificial Sequence
  synthetic polypeptide
HDYSNYPYFDY

SEQ ID NO: 1401 - protein, 5 aa, Artificial Sequence
  synthetic polypeptide
SYAMS

SEQ ID NO: 1402 - protein, 17 aa, Artificial Sequence
  synthetic polypeptide
AISGSGGRTFYAESVEG

SEQ ID NO: 1403 - protein, 11 aa, Artificial Sequence
  synthetic polypeptide
HDYSNYPYFDY

SEQ ID NO: 1404 - protein, 5 aa, Artificial Sequence
  synthetic polypeptide
SYAMS

SEQ ID NO: 1405 - protein, 17 aa, Artificial Sequence
  synthetic polypeptide
AISGSGGRTHYAESVKG

SEQ ID NO: 1406 - protein, 11 aa, Artificial Sequence
  synthetic polypeptide
HDYSNYPYFDY

SEQ ID NO: 1407 - protein, 5 aa, Artificial Sequence
  synthetic polypeptide
SYAMS

SEQ ID NO: 1408 - protein, 17 aa, Artificial Sequence
  synthetic polypeptide
LISGSGGRTHYAESVKG

SEQ ID NO: 1409 - protein, 11 aa, Artificial Sequence
  synthetic polypeptide
HDYSNYPYFDY

SEQ ID NO: 1410 - protein, 5 aa, Artificial Sequence
  synthetic polypeptide
TYAMS

SEQ ID NO: 1411 - protein, 17 aa, Artificial Sequence
  synthetic polypeptide
AISGSGGSTFYAESVKG

SEQ ID NO: 1412 - protein, 11 aa, Artificial Sequence
  synthetic polypeptide
HDYSNYPYFDY

SEQ ID NO: 1413 - protein, 5 aa, Artificial Sequence
  synthetic polypeptide
TYAMS

SEQ ID NO: 1414 - protein, 17 aa, Artificial Sequence
  synthetic polypeptide
AISGSGGRTFYAESVEG

SEQ ID NO: 1415 - protein, 11 aa, Artificial Sequence
  synthetic polypeptide
HDYSNYPYFDY

SEQ ID NO: 1416 - protein, 5 aa, Artificial Sequence
  synthetic polypeptide
SYAMS

SEQ ID NO: 1417 - protein, 17 aa, Artificial Sequence
  synthetic polypeptide
AISGSGGYTYYAESVKG

SEQ ID NO: 1418 - protein, 11 aa, Artificial Sequence
  synthetic polypeptide
HDYSNYPYFDY

SEQ ID NO: 1419 - protein, 5 aa, Artificial Sequence
  synthetic polypeptide
SYAMS

SEQ ID NO: 1420 - protein, 17 aa, Artificial Sequence
  synthetic polypeptide
AISGSGGSTFYAESVKG

SEQ ID NO: 1421 - protein, 11 aa, Artificial Sequence
  synthetic polypeptide
HDYSNYPYFDY

SEQ ID NO: 1422 - protein, 5 aa, Artificial Sequence
  synthetic polypeptide
SYAMS

SEQ ID NO: 1423 - protein, 17 aa, Artificial Sequence
  synthetic polypeptide
AISGSGGRTFYAESVEG

SEQ ID NO: 1424 - protein, 11 aa, Artificial Sequence
  synthetic polypeptide
HDYSNYPYFDY

SEQ ID NO: 1425 - protein, 5 aa, Artificial Sequence
  synthetic polypeptide
SYAMS

SEQ ID NO: 1426 - protein, 17 aa, Artificial Sequence
  synthetic polypeptide
AISGSGGRTFYAESVEG

SEQ ID NO: 1427 - protein, 11 aa, Artificial Sequence
  synthetic polypeptide
HDYSNYPYFDY

SEQ ID NO: 1428 - protein, 5 aa, Artificial Sequence
  synthetic polypeptide
SYAMS

SEQ ID NO: 1429 - protein, 17 aa, Artificial Sequence
  synthetic polypeptide
AISGSGGSTFYAESVQG

SEQ ID NO: 1430 - protein, 11 aa, Artificial Sequence
  synthetic polypeptide
HDYSNYPYFDY

SEQ ID NO: 1431 - protein, 5 aa, Artificial Sequence
  synthetic polypeptide
TYAMS

SEQ ID NO: 1432 - protein, 17 aa, Artificial Sequence
  synthetic polypeptide
AISGSGGGTFYAESVKG

SEQ ID NO: 1433 - protein, 11 aa, Artificial Sequence
  synthetic polypeptide
HDYSNYPYFDY

SEQ ID NO: 1434 - protein, 5 aa, Artificial Sequence
  synthetic polypeptide
TYAMS

SEQ ID NO: 1435 - protein, 17 aa, Artificial Sequence
  synthetic polypeptide
LISGSGGRTYYAESVKG

SEQ ID NO: 1436 - protein, 11 aa, Artificial Sequence
  synthetic polypeptide
HDYSNYPYFDY

SEQ ID NO: 1437 - protein, 5 aa, Artificial Sequence
  synthetic polypeptide
SYAMS

SEQ ID NO: 1438 - protein, 17 aa, Artificial Sequence
  synthetic polypeptide
AISGSGGRAQYAESVQG

SEQ ID NO: 1439 - protein, 11 aa, Artificial Sequence
  synthetic polypeptide
HDYSNYPYFDY

SEQ ID NO: 1440 - protein, 5 aa, Artificial Sequence
  synthetic polypeptide
SYAMS

SEQ ID NO: 1441 - protein, 17 aa, Artificial Sequence
  synthetic polypeptide
AISGSGGRTFYAESVEG

SEQ ID NO: 1442 - protein, 11 aa, Artificial Sequence
  synthetic polypeptide
HDYSNYPYFDY

SEQ ID NO: 1443 - protein, 5 aa, Artificial Sequence
  synthetic polypeptide
SYAMS

SEQ ID NO: 1444 - protein, 17 aa, Artificial Sequence
  synthetic polypeptide
AIGEGGGYTYYAESVKG

SEQ ID NO: 1445 - protein, 11 aa, Artificial Sequence
  synthetic polypeptide
HDYSNYPYFDY

SEQ ID NO: 1446 - protein, 5 aa, Artificial Sequence
  synthetic polypeptide
SYAMS

SEQ ID NO: 1447 - protein, 17 aa, Artificial Sequence
  synthetic polypeptide
AISGSGGRTFYAESVEG

SEQ ID NO: 1448 - protein, 11 aa, Artificial Sequence
  synthetic polypeptide
HDYSNYPYFDY

SEQ ID NO: 1449 - protein, 5 aa, Artificial Sequence
  synthetic polypeptide
SYAMS

SEQ ID NO: 1450 - protein, 17 aa, Artificial Sequence
  synthetic polypeptide
AISGSGGGTFYAESVEG

SEQ ID NO: 1451 - protein, 11 aa, Artificial Sequence
  synthetic polypeptide
HDYSNYPYFDY

SEQ ID NO: 1452 - protein, 5 aa, Artificial Sequence
  synthetic polypeptide
SYAMS

SEQ ID NO: 1453 - protein, 17 aa, Artificial Sequence
  synthetic polypeptide
AISGSGGRTFYAESVEG

SEQ ID NO: 1454 - protein, 11 aa, Artificial Sequence
  synthetic polypeptide
HDYSNYPYFDY

SEQ ID NO: 1455 - protein, 5 aa, Artificial Sequence
  synthetic polypeptide
TYAMS

SEQ ID NO: 1456 - protein, 17 aa, Artificial Sequence
  synthetic polypeptide
LISGSGGRTYYAESVKG

SEQ ID NO: 1457 - protein, 11 aa, Artificial Sequence
  synthetic polypeptide
HDYSNYPYFDY

SEQ ID NO: 1458 - protein, 5 aa, Artificial Sequence
  synthetic polypeptide
SYAMS

SEQ ID NO: 1459 - protein, 17 aa, Artificial Sequence
  synthetic polypeptide
AISGSGGRTFYAESVEG

SEQ ID NO: 1460 - protein, 11 aa, Artificial Sequence
  synthetic polypeptide
HDYSNYPYFDY

SEQ ID NO: 1461 - protein, 5 aa, Artificial Sequence
  synthetic polypeptide
SYAMS

SEQ ID NO: 1462 - protein, 17 aa, Artificial Sequence
  synthetic polypeptide
VISGSGGITDFAESVKG

SEQ ID NO: 1463 - protein, 11 aa, Artificial Sequence
  synthetic polypeptide
HDYSNYFFFDY

SEQ ID NO: 1464 - protein, 5 aa, Artificial Sequence
  synthetic polypeptide
SYAMS

SEQ ID NO: 1465 - protein, 17 aa, Artificial Sequence
  synthetic polypeptide
AISGSGGRTFYAESVEG

SEQ ID NO: 1466 - protein, 11 aa, Artificial Sequence
  synthetic polypeptide
HDYSNYPYFDY

SEQ ID NO: 1467 - protein, 5 aa, Artificial Sequence
  synthetic polypeptide
IYAMS

SEQ ID NO: 1468 - protein, 17 aa, Artificial Sequence
  synthetic polypeptide
AIGGSGGSTFYAESVKG

SEQ ID NO: 1469 - protein, 11 aa, Artificial Sequence
  synthetic polypeptide
HDYSNYPYFDY

SEQ ID NO: 1470 - protein, 7 aa, Artificial Sequence
  synthetic polypeptide
SSSYYWG

SEQ ID NO: 1471 - protein, 16 aa, Artificial Sequence
  synthetic polypeptide
SIYHSGGTYFNPSLKS

SEQ ID NO: 1472 - protein, 15 aa, Artificial Sequence
  synthetic polypeptide
HYEILTGYYPDVFDI

SEQ ID NO: 1473 - protein, 5 aa, Artificial Sequence
  synthetic polypeptide
SYSMN

SEQ ID NO: 1474 - protein, 17 aa, Artificial Sequence
  synthetic polypeptide
YISSSGGYIYYAESVKG

SEQ ID NO: 1475 - protein, 11 aa, Artificial Sequence
  synthetic polypeptide
GDYSNYAYFDY

SEQ ID NO: 1476 - protein, 5 aa, Artificial Sequence
  synthetic polypeptide
VYAMS

SEQ ID NO: 1477 - protein, 17 aa, Artificial Sequence
  synthetic polypeptide
TISGSGGSTFYAESVKG

SEQ ID NO: 1478 - protein, 11 aa, Artificial Sequence
  synthetic polypeptide
HDYSNYAYFDY

SEQ ID NO: 1479 - protein, 5 aa, Artificial Sequence
  synthetic polypeptide
SYGMH

SEQ ID NO: 1480 - protein, 17 aa, Artificial Sequence
  synthetic polypeptide
VISYEGSNKYYAESVKG

SEQ ID NO: 1481 - protein, 15 aa, Artificial Sequence
  synthetic polypeptide
GRYYGSGNYNHGMDV

SEQ ID NO: 1482 - protein, 5 aa, Artificial Sequence
  synthetic polypeptide
SYGMH

SEQ ID NO: 1483 - protein, 17 aa, Artificial Sequence
  synthetic polypeptide
VTWYDASNKYYGDAVKG

SEQ ID NO: 1484 - protein, 13 aa, Artificial Sequence
  synthetic polypeptide
DLLRGVKGYAMDV

SEQ ID NO: 1485 - protein, 5 aa, Artificial Sequence
  synthetic polypeptide
SYGIS

SEQ ID NO: 1486 - protein, 17 aa, Artificial Sequence
  synthetic polypeptide
WISAYQGYTHYAQKLQG

SEQ ID NO: 1487 - protein, 12 aa, Artificial Sequence
  synthetic polypeptide
DYGGNDYYGMDV

SEQ ID NO: 1488 - protein, 5 aa, Artificial Sequence
  synthetic polypeptide
YYGMH

SEQ ID NO: 1489 - protein, 17 aa, Artificial Sequence
  synthetic polypeptide
VIWYDASNKYYADAVKG

SEQ ID NO: 1490 - protein, 12 aa, Artificial Sequence
  synthetic polypeptide
DREMGSRGDFDY

SEQ ID NO: 1491 - protein, 5 aa, Artificial Sequence
  synthetic polypeptide
GFYWS

SEQ ID NO: 1492 - protein, 16 aa, Artificial Sequence
  synthetic polypeptide
EIYHSGHATNNPSLKS

SEQ ID NO: 1493 - protein, 10 aa, Artificial Sequence
  synthetic polypeptide
GGNSGYIFDY

SEQ ID NO: 1494 - protein, 5 aa, Artificial Sequence
  synthetic polypeptide
TYGMH

SEQ ID NO: 1495 - protein, 17 aa, Artificial Sequence
  synthetic polypeptide
VIWYEGSNKYYGESVKG

SEQ ID NO: 1496 - protein, 11 aa, Artificial Sequence
  synthetic polypeptide
DNSHYYYGMDV

SEQ ID NO: 1497 - protein, 5 aa, Artificial Sequence
  synthetic polypeptide
TYGMH

SEQ ID NO: 1498 - protein, 17 aa, Artificial Sequence
  synthetic polypeptide
VIWYEGSNKYYGESVKG

SEQ ID NO: 1499 - protein, 11 aa, Artificial Sequence
  synthetic polypeptide
DNSHYYYGMDV

SEQ ID NO: 1500 - protein, 7 aa, Artificial Sequence
  synthetic polypeptide
SGVYYWS

SEQ ID NO: 1501 - protein, 16 aa, Artificial Sequence
  synthetic polypeptide
YIYYSGSTSYNPSLKS

SEQ ID NO: 1502 - protein, 10 aa, Artificial Sequence
  synthetic polypeptide
SGYSYALFDY

SEQ ID NO: 1503 - protein, 7 aa, Artificial Sequence
  synthetic polypeptide
SGGYYWS

SEQ ID NO: 1504 - protein, 16 aa, Artificial Sequence
  synthetic polypeptide
YIFYSGSTDYNPSLKS

SEQ ID NO: 1505 - protein, 10 aa, Artificial Sequence
  synthetic polypeptide
SGYSYALFDA

SEQ ID NO: 1506 - protein, 5 aa, Artificial Sequence
  synthetic polypeptide
SYAMS

SEQ ID NO: 1507 - protein, 17 aa, Artificial Sequence
  synthetic polypeptide
VISGSGGRPNYADSVKG

SEQ ID NO: 1508 - protein, 11 aa, Artificial Sequence
  synthetic polypeptide
VDYSNYLFFDY

SEQ ID NO: 1509 - protein, 5 aa, Artificial Sequence
  synthetic polypeptide
IYAMS

SEQ ID NO: 1510 - protein, 17 aa, Artificial Sequence
  synthetic polypeptide
AISGSGGSTFYADSVKG

SEQ ID NO: 1511 - protein, 11 aa, Artificial Sequence
  synthetic polypeptide
HDYSNYPYFDY

SEQ ID NO: 1512 - protein, 5 aa, Artificial Sequence
  synthetic polypeptide
SYAMS

SEQ ID NO: 1513 - protein, 17 aa, Artificial Sequence
  synthetic polypeptide
AISGSGGRTFYADSVEG

SEQ ID NO: 1514 - protein, 11 aa, Artificial Sequence
  synthetic polypeptide
HDYSNYPYFDY

SEQ ID NO: 1515 - protein, 5 aa, Artificial Sequence
  synthetic polypeptide
SYAMS

SEQ ID NO: 1516 - protein, 17 aa, Artificial Sequence
  synthetic polypeptide
AISGSGGRTFYADSVEG

SEQ ID NO: 1517 - protein, 11 aa, Artificial Sequence
  synthetic polypeptide
HDYSNYPYFDY

SEQ ID NO: 1518 - protein, 5 aa, Artificial Sequence
  synthetic polypeptide
SYAMS

SEQ ID NO: 1519 - protein, 17 aa, Artificial Sequence
  synthetic polypeptide
AISGSGGRTHYADSVKG

SEQ ID NO: 1520 - protein, 11 aa, Artificial Sequence
  synthetic polypeptide
HDYSNYPYFDY

SEQ ID NO: 1521 - protein, 5 aa, Artificial Sequence
  synthetic polypeptide
SYAMS

SEQ ID NO: 1522 - protein, 17 aa, Artificial Sequence
  synthetic polypeptide
LISGSGGRTHYADSVKG

SEQ ID NO: 1523 - protein, 11 aa, Artificial Sequence
  synthetic polypeptide
HDYSNYPYFDY

SEQ ID NO: 1524 - protein, 5 aa, Artificial Sequence
  synthetic polypeptide
TYAMS

SEQ ID NO: 1525 - protein, 17 aa, Artificial Sequence
  synthetic polypeptide
AISGSGGSTFYADSVKG

SEQ ID NO: 1526 - protein, 11 aa, Artificial Sequence
  synthetic polypeptide
HDYSNYPYFDY

SEQ ID NO: 1527 - protein, 5 aa, Artificial Sequence
  synthetic polypeptide
TYAMS

SEQ ID NO: 1528 - protein, 17 aa, Artificial Sequence
  synthetic polypeptide
AISGSGGRTFYADSVEG

SEQ ID NO: 1529 - protein, 11 aa, Artificial Sequence
  synthetic polypeptide
HDYSNYPYFDY

SEQ ID NO: 1530 - protein, 5 aa, Artificial Sequence
  synthetic polypeptide
SYAMS

SEQ ID NO: 1531 - protein, 17 aa, Artificial Sequence
  synthetic polypeptide
AISGSGGYTYYADSVKG

SEQ ID NO: 1532 - protein, 11 aa, Artificial Sequence
  synthetic polypeptide
HDYSNYPYFDY

SEQ ID NO: 1533 - protein, 5 aa, Artificial Sequence
  synthetic polypeptide
SYAMS

SEQ ID NO: 1534 - protein, 17 aa, Artificial Sequence
  synthetic polypeptide
AISGSGGSTFYADSVKG

SEQ ID NO: 1535 - protein, 11 aa, Artificial Sequence
  synthetic polypeptide
HDYSNYPYFDY

SEQ ID NO: 1536 - protein, 5 aa, Artificial Sequence
  synthetic polypeptide
SYAMS

SEQ ID NO: 1537 - protein, 17 aa, Artificial Sequence
  synthetic polypeptide
AISGSGGRTFYADSVEG

SEQ ID NO: 1538 - protein, 11 aa, Artificial Sequence
  synthetic polypeptide
HDYSNYPYFDY

SEQ ID NO: 1539 - protein, 5 aa, Artificial Sequence
  synthetic polypeptide
SYAMS

SEQ ID NO: 1540 - protein, 17 aa, Artificial Sequence
  synthetic polypeptide
AISGSGGRTFYADSVEG

SEQ ID NO: 1541 - protein, 11 aa, Artificial Sequence
  synthetic polypeptide
HDYSNYPYFDY

SEQ ID NO: 1542 - protein, 5 aa, Artificial Sequence
  synthetic polypeptide
SYAMS

SEQ ID NO: 1543 - protein, 17 aa, Artificial Sequence
  synthetic polypeptide
AISGSGGSTFYADSVQG

SEQ ID NO: 1544 - protein, 11 aa, Artificial Sequence
  synthetic polypeptide
HDYSNYPYFDY

SEQ ID NO: 1545 - protein, 5 aa, Artificial Sequence
  synthetic polypeptide
SYAMS

SEQ ID NO: 1546 - protein, 17 aa, Artificial Sequence
  synthetic polypeptide
AISGSGGSTFYADSVQG

SEQ ID NO: 1547 - protein, 11 aa, Artificial Sequence
  synthetic polypeptide
HDYSNYPYFDY

SEQ ID NO: 1548 - protein, 5 aa, Artificial Sequence
  synthetic polypeptide
TYAMS

SEQ ID NO: 1549 - protein, 17 aa, Artificial Sequence
  synthetic polypeptide
AISGSGGGTFYADSVKG

SEQ ID NO: 1550 - protein, 11 aa, Artificial Sequence
  synthetic polypeptide
HDYSNYPYFDY

SEQ ID NO: 1551 - protein, 5 aa, Artificial Sequence
  synthetic polypeptide
TYAMS

SEQ ID NO: 1552 - protein, 17 aa, Artificial Sequence
  synthetic polypeptide
LISGSGGRTYYADSVKG

SEQ ID NO: 1553 - protein, 11 aa, Artificial Sequence
  synthetic polypeptide
HDYSNYPYFDY

SEQ ID NO: 1554 - protein, 5 aa, Artificial Sequence
  synthetic polypeptide
SYAMS

SEQ ID NO: 1555 - protein, 17 aa, Artificial Sequence
  synthetic polypeptide
AISGSGGRAQYADSVQG

SEQ ID NO: 1556 - protein, 11 aa, Artificial Sequence
  synthetic polypeptide
HDYSNYPYFDY

SEQ ID NO: 1557 - protein, 5 aa, Artificial Sequence
  synthetic polypeptide
SYAMS

SEQ ID NO: 1558 - protein, 17 aa, Artificial Sequence
  synthetic polypeptide
AISGSGGRTFYADSVEG

SEQ ID NO: 1559 - protein, 11 aa, Artificial Sequence
  synthetic polypeptide
HDYSNYPYFDY

SEQ ID NO: 1560 - protein, 5 aa, Artificial Sequence
  synthetic polypeptide
SYAMS

SEQ ID NO: 1561 - protein, 17 aa, Artificial Sequence
  synthetic polypeptide
AIGDGGGYTYYADSVKG

SEQ ID NO: 1562 - protein, 11 aa, Artificial Sequence
  synthetic polypeptide
HDYSNYPYFDY

SEQ ID NO: 1563 - protein, 5 aa, Artificial Sequence
  synthetic polypeptide
SYAMS

SEQ ID NO: 1564 - protein, 17 aa, Artificial Sequence
  synthetic polypeptide
AISGSGGRTFYADSVEG

SEQ ID NO: 1565 - protein, 11 aa, Artificial Sequence
  synthetic polypeptide
HDYSNYPYFDY

SEQ ID NO: 1566 - protein, 5 aa, Artificial Sequence
  synthetic polypeptide
SYAMS

SEQ ID NO: 1567 - protein, 17 aa, Artificial Sequence
  synthetic polypeptide
AISGSGGGTFYADSVEG

SEQ ID NO: 1568 - protein, 11 aa, Artificial Sequence
  synthetic polypeptide
HDYSNYPYFDY

SEQ ID NO: 1569 - protein, 5 aa, Artificial Sequence
  synthetic polypeptide
SYAMS

SEQ ID NO: 1570 - protein, 17 aa, Artificial Sequence
  synthetic polypeptide
AISGSGGRTFYADSVEG

SEQ ID NO: 1571 - protein, 11 aa, Artificial Sequence
  synthetic polypeptide
HDYSNYPYFDY

SEQ ID NO: 1572 - protein, 5 aa, Artificial Sequence
  synthetic polypeptide
TYAMS

SEQ ID NO: 1573 - protein, 17 aa, Artificial Sequence
  synthetic polypeptide
LISGSGGRTYYADSVKG

SEQ ID NO: 1574 - protein, 11 aa, Artificial Sequence
  synthetic polypeptide
HDYSNYPYFDY

SEQ ID NO: 1575 - protein, 5 aa, Artificial Sequence
  synthetic polypeptide
SYAMS

SEQ ID NO: 1576 - protein, 17 aa, Artificial Sequence
  synthetic polypeptide
AISGSGGRTFYADSVEG

SEQ ID NO: 1577 - protein, 11 aa, Artificial Sequence
  synthetic polypeptide
HDYSNYPYFDY

SEQ ID NO: 1578 - protein, 5 aa, Artificial Sequence
  synthetic polypeptide
SYAMS

SEQ ID NO: 1579 - protein, 17 aa, Artificial Sequence
  synthetic polypeptide
VISDSGGITDFADSVKG

SEQ ID NO: 1580 - protein, 11 aa, Artificial Sequence
  synthetic polypeptide
HDYSNYFFFDY

SEQ ID NO: 1581 - protein, 5 aa, Artificial Sequence
  synthetic polypeptide
SYAMS

SEQ ID NO: 1582 - protein, 17 aa, Artificial Sequence
  synthetic polypeptide
AISGSGGRTFYADSVEG

SEQ ID NO: 1583 - protein, 11 aa, Artificial Sequence
  synthetic polypeptide
HDYSNYPYFDY

SEQ ID NO: 1584 - protein, 5 aa, Artificial Sequence
  synthetic polypeptide
IYAMS

SEQ ID NO: 1585 - protein, 17 aa, Artificial Sequence
  synthetic polypeptide
AIGDSGGSTFYADSVKG

SEQ ID NO: 1586 - protein, 11 aa, Artificial Sequence
  synthetic polypeptide
HDYSNYPYFDY

SEQ ID NO: 1587 - protein, 7 aa, Artificial Sequence
  synthetic polypeptide
SSSYYWG

SEQ ID NO: 1588 - protein, 16 aa, Artificial Sequence
  synthetic polypeptide
SIYHSGGTYFNPSLKS

SEQ ID NO: 1589 - protein, 15 aa, Artificial Sequence
  synthetic polypeptide
HYEILTGYYPDVFDI

SEQ ID NO: 1590 - protein, 5 aa, Artificial Sequence
  synthetic polypeptide
SYSMN

SEQ ID NO: 1591 - protein, 17 aa, Artificial Sequence
  synthetic polypeptide
YISSSGGYIYYADSVKG

SEQ ID NO: 1592 - protein, 11 aa, Artificial Sequence
  synthetic polypeptide
GDYSNYAYFDY

SEQ ID NO: 1593 - protein, 5 aa, Artificial Sequence
  synthetic polypeptide
VYAMS

SEQ ID NO: 1594 - protein, 17 aa, Artificial Sequence
  synthetic polypeptide
TISDSGGSTFYADSVKG

SEQ ID NO: 1595 - protein, 11 aa, Artificial Sequence
  synthetic polypeptide
HDYSNYAYFDY

SEQ ID NO: 1596 - protein, 5 aa, Artificial Sequence
  synthetic polypeptide
SYGMH

SEQ ID NO: 1597 - protein, 17 aa, Artificial Sequence
  synthetic polypeptide
VISYDGSNKYYADSVKG

SEQ ID NO: 1598 - protein, 15 aa, Artificial Sequence
  synthetic polypeptide
GRYYGSGNYNHGMDV

SEQ ID NO: 1599 - protein, 5 aa, Artificial Sequence
  synthetic polypeptide
SYAMS

SEQ ID NO: 1600 - protein, 17 aa, Artificial Sequence
  synthetic polypeptide
VISGSGGRPNYAESVKG

SEQ ID NO: 1601 - protein, 11 aa, Artificial Sequence
  synthetic polypeptide
VDYSNYLFFDY

SEQ ID NO: 1602 - protein, 5 aa, Artificial Sequence
  synthetic polypeptide
IYAMS

SEQ ID NO: 1603 - protein, 17 aa, Artificial Sequence
  synthetic polypeptide
AISGSGGSTFYAESVKG

SEQ ID NO: 1604 - protein, 11 aa, Artificial Sequence
  synthetic polypeptide
HDYSNYPYFDY

SEQ ID NO: 1605 - protein, 5 aa, Artificial Sequence
  synthetic polypeptide
SYAMS

SEQ ID NO: 1606 - protein, 17 aa, Artificial Sequence
  synthetic polypeptide
AISGSGGRTFYAESVEG

SEQ ID NO: 1607 - protein, 11 aa, Artificial Sequence
  synthetic polypeptide
HDYSNYPYFDY

SEQ ID NO: 1608 - protein, 5 aa, Artificial Sequence
  synthetic polypeptide
SYAMS

SEQ ID NO: 1609 - protein, 17 aa, Artificial Sequence
  synthetic polypeptide
AISGSGGRTFYAESVEG

SEQ ID NO: 1610 - protein, 11 aa, Artificial Sequence
  synthetic polypeptide
HDYSNYPYFDY

SEQ ID NO: 1611 - protein, 5 aa, Artificial Sequence
  synthetic polypeptide
SYAMS

SEQ ID NO: 1612 - protein, 17 aa, Artificial Sequence
  synthetic polypeptide
AISGSGGRTHYAESVKG

SEQ ID NO: 1613 - protein, 11 aa, Artificial Sequence
  synthetic polypeptide
HDYSNYPYFDY

SEQ ID NO: 1614 - protein, 5 aa, Artificial Sequence
  synthetic polypeptide
TYAMS

SEQ ID NO: 1615 - protein, 17 aa, Artificial Sequence
  synthetic polypeptide
AISGSGGSTFYAESVKG

SEQ ID NO: 1616 - protein, 11 aa, Artificial Sequence
  synthetic polypeptide
HDYSNYPYFDY

SEQ ID NO: 1617 - protein, 5 aa, Artificial Sequence
  synthetic polypeptide
TYAMS

SEQ ID NO: 1618 - protein, 17 aa, Artificial Sequence
  synthetic polypeptide
AISGSGGRTFYAESVEG

SEQ ID NO: 1619 - protein, 11 aa, Artificial Sequence
  synthetic polypeptide
HDYSNYPYFDY

SEQ ID NO: 1620 - protein, 5 aa, Artificial Sequence
  synthetic polypeptide
SYAMS

SEQ ID NO: 1621 - protein, 17 aa, Artificial Sequence
  synthetic polypeptide
AISGSGGYTYYAESVKG

SEQ ID NO: 1622 - protein, 11 aa, Artificial Sequence
  synthetic polypeptide
HDYSNYPYFDY

SEQ ID NO: 1623 - protein, 5 aa, Artificial Sequence
  synthetic polypeptide
SYAMS

SEQ ID NO: 1624 - protein, 17 aa, Artificial Sequence
  synthetic polypeptide
AISGSGGSTFYAESVKG

SEQ ID NO: 1625 - protein, 11 aa, Artificial Sequence
  synthetic polypeptide
HDYSNYPYFDY

SEQ ID NO: 1626 - protein, 5 aa, Artificial Sequence
  synthetic polypeptide
SYAMS

SEQ ID NO: 1627 - protein, 17 aa, Artificial Sequence
  synthetic polypeptide
AISGSGGRTFYAESVEG

SEQ ID NO: 1628 - protein, 11 aa, Artificial Sequence
  synthetic polypeptide
HDYSNYPYFDY

SEQ ID NO: 1629 - protein, 5 aa, Artificial Sequence
  synthetic polypeptide
SYAMS

SEQ ID NO: 1630 - protein, 17 aa, Artificial Sequence
  synthetic polypeptide
AISGSGGRTFYAESVEG

SEQ ID NO: 1631 - protein, 11 aa, Artificial Sequence
  synthetic polypeptide
HDYSNYPYFDY

SEQ ID NO: 1632 - protein, 5 aa, Artificial Sequence
  synthetic polypeptide
SYAMS

SEQ ID NO: 1633 - protein, 17 aa, Artificial Sequence
  synthetic polypeptide
AISGSGGSTFYAESVQG

SEQ ID NO: 1634 - protein, 11 aa, Artificial Sequence
  synthetic polypeptide
HDYSNYPYFDY

SEQ ID NO: 1635 - protein, 5 aa, Artificial Sequence
  synthetic polypeptide
TYAMS

SEQ ID NO: 1636 - protein, 17 aa, Artificial Sequence
  synthetic polypeptide
AISGSGGGTFYAESVKG

SEQ ID NO: 1637 - protein, 11 aa, Artificial Sequence
  synthetic polypeptide
HDYSNYPYFDY

SEQ ID NO: 1638 - protein, 5 aa, Artificial Sequence
  synthetic polypeptide
TYAMS

SEQ ID NO: 1639 - protein, 17 aa, Artificial Sequence
  synthetic polypeptide
LISGSGGRTYYAESVKG

SEQ ID NO: 1640 - protein, 11 aa, Artificial Sequence
  synthetic polypeptide
HDYSNYPYFDY

SEQ ID NO: 1641 - protein, 5 aa, Artificial Sequence
  synthetic polypeptide
SYAMS

SEQ ID NO: 1642 - protein, 17 aa, Artificial Sequence
  synthetic polypeptide
AISGSGGRAQYAESVQG

SEQ ID NO: 1643 - protein, 11 aa, Artificial Sequence
  synthetic polypeptide
HDYSNYPYFDY

SEQ ID NO: 1644 - protein, 5 aa, Artificial Sequence
  synthetic polypeptide
SYAMS

SEQ ID NO: 1645 - protein, 17 aa, Artificial Sequence
  synthetic polypeptide
AISGSGGRTFYAESVEG

SEQ ID NO: 1646 - protein, 11 aa, Artificial Sequence
  synthetic polypeptide
HDYSNYPYFDY

SEQ ID NO: 1647 - protein, 5 aa, Artificial Sequence
  synthetic polypeptide
SYAMS

SEQ ID NO: 1648 - protein, 17 aa, Artificial Sequence
  synthetic polypeptide
AIGEGGGYTYYAESVKG

SEQ ID NO: 1649 - protein, 11 aa, Artificial Sequence
  synthetic polypeptide
HDYSNYPYFDY

SEQ ID NO: 1650 - protein, 5 aa, Artificial Sequence
  synthetic polypeptide
SYAMS

SEQ ID NO: 1651 - protein, 17 aa, Artificial Sequence
  synthetic polypeptide
AISGSGGRTFYAESVEG

SEQ ID NO: 1652 - protein, 11 aa, Artificial Sequence
  synthetic polypeptide
HDYSNYPYFDY

SEQ ID NO: 1653 - protein, 5 aa, Artificial Sequence
  synthetic polypeptide
SYAMS

SEQ ID NO: 1654 - protein, 17 aa, Artificial Sequence
  synthetic polypeptide
AISGSGGGTFYAESVEG

SEQ ID NO: 1655 - protein, 11 aa, Artificial Sequence
  synthetic polypeptide
HDYSNYPYFDY

SEQ ID NO: 1656 - protein, 5 aa, Artificial Sequence
  synthetic polypeptide
SYAMS

SEQ ID NO: 1657 - protein, 17 aa, Artificial Sequence
  synthetic polypeptide
AISGSGGRTFYAESVEG

SEQ ID NO: 1658 - protein, 11 aa, Artificial Sequence
  synthetic polypeptide
HDYSNYPYFDY

SEQ ID NO: 1659 - protein, 5 aa, Artificial Sequence
  synthetic polypeptide
TYAMS

SEQ ID NO: 1660 - protein, 17 aa, Artificial Sequence
  synthetic polypeptide
LISGSGGRTYYAESVKG

SEQ ID NO: 1661 - protein, 11 aa, Artificial Sequence
  synthetic polypeptide
HDYSNYPYFDY

SEQ ID NO: 1662 - protein, 5 aa, Artificial Sequence
  synthetic polypeptide
SYAMS

SEQ ID NO: 1663 - protein, 17 aa, Artificial Sequence
  synthetic polypeptide
AISGSGGRTFYAESVEG

SEQ ID NO: 1664 - protein, 11 aa, Artificial Sequence
  synthetic polypeptide
HDYSNYPYFDY

SEQ ID NO: 1665 - protein, 5 aa, Artificial Sequence
  synthetic polypeptide
SYAMS

SEQ ID NO: 1666 - protein, 17 aa, Artificial Sequence
  synthetic polypeptide
VISGSGGITDFAESVKG

SEQ ID NO: 1667 - protein, 11 aa, Artificial Sequence
  synthetic polypeptide
HDYSNYFFFDY

SEQ ID NO: 1668 - protein, 5 aa, Artificial Sequence
  synthetic polypeptide
SYAMS

SEQ ID NO: 1669 - protein, 17 aa, Artificial Sequence
  synthetic polypeptide
AISGSGGRTFYAESVEG

SEQ ID NO: 1670 - protein, 11 aa, Artificial Sequence
  synthetic polypeptide
HDYSNYPYFDY

SEQ ID NO: 1671 - protein, 5 aa, Artificial Sequence
  synthetic polypeptide
IYAMS

SEQ ID NO: 1672 - protein, 17 aa, Artificial Sequence
  synthetic polypeptide
AIGGSGGSTFYAESVKG

SEQ ID NO: 1673 - protein, 11 aa, Artificial Sequence
  synthetic polypeptide
HDYSNYPYFDY

SEQ ID NO: 1674 - protein, 7 aa, Artificial Sequence
  synthetic polypeptide
SSSYYWG

SEQ ID NO: 1675 - protein, 16 aa, Artificial Sequence
  synthetic polypeptide
SIYHSGGTYFNPSLKS

SEQ ID NO: 1676 - protein, 15 aa, Artificial Sequence
  synthetic polypeptide
HYEILTGYYPDVFDI

SEQ ID NO: 1677 - protein, 5 aa, Artificial Sequence
  synthetic polypeptide
SYSMN

SEQ ID NO: 1678 - protein, 17 aa, Artificial Sequence
  synthetic polypeptide
YISSSGGYIYYAESVKG

SEQ ID NO: 1679 - protein, 11 aa, Artificial Sequence
  synthetic polypeptide
GDYSNYAYFDY

SEQ ID NO: 1680 - protein, 5 aa, Artificial Sequence
  synthetic polypeptide
VYAMS

SEQ ID NO: 1681 - protein, 17 aa, Artificial Sequence
  synthetic polypeptide
TISGSGGSTFYAESVKG

SEQ ID NO: 1682 - protein, 11 aa, Artificial Sequence
  synthetic polypeptide
HDYSNYAYFDY

SEQ ID NO: 1683 - protein, 5 aa, Artificial Sequence
  synthetic polypeptide
SYGMH

SEQ ID NO: 1684 - protein, 17 aa, Artificial Sequence
  synthetic polypeptide
VISYEGSNKYYAESVKG

SEQ ID NO: 1685 - protein, 15 aa, Artificial Sequence
  synthetic polypeptide
GRYYGSGNYNHGMDV

SEQ ID NO: 1686 - protein, 5 aa, Artificial Sequence
  synthetic polypeptide
SYGMH

SEQ ID NO: 1687 - protein, 17 aa, Artificial Sequence
  synthetic polypeptide
VTWYDASNKYYGDAVKG

SEQ ID NO: 1688 - protein, 13 aa, Artificial Sequence
  synthetic polypeptide
DLLRGVKGYAMDV

SEQ ID NO: 1689 - protein, 5 aa, Artificial Sequence
  synthetic polypeptide
SYGIS

SEQ ID NO: 1690 - protein, 17 aa, Artificial Sequence
  synthetic polypeptide
WISAYQGYTHYAQKLQG

SEQ ID NO: 1691 - protein, 12 aa, Artificial Sequence
  synthetic polypeptide
DYGGNDYYGMDV

SEQ ID NO: 1692 - protein, 5 aa, Artificial Sequence
  synthetic polypeptide
YYGMH

SEQ ID NO: 1693 - protein, 17 aa, Artificial Sequence
  synthetic polypeptide
VIWYDASNKYYADAVKG

SEQ ID NO: 1694 - protein, 12 aa, Artificial Sequence
  synthetic polypeptide
DREMGSRGDFDY

SEQ ID NO: 1695 - protein, 5 aa, Artificial Sequence
  synthetic polypeptide
GFYWS

SEQ ID NO: 1696 - protein, 16 aa, Artificial Sequence
  synthetic polypeptide
EIYHSGHATNNPSLKS

SEQ ID NO: 1697 - protein, 10 aa, Artificial Sequence
  synthetic polypeptide
GGNSGYIFDY

SEQ ID NO: 1698 - protein, 5 aa, Artificial Sequence
  synthetic polypeptide
TYGMH

SEQ ID NO: 1699 - protein, 17 aa, Artificial Sequence
  synthetic polypeptide
VIWYEGSNKYYGESVKG

SEQ ID NO: 1700 - protein, 11 aa, Artificial Sequence
  synthetic polypeptide
DNSHYYYGMDV

SEQ ID NO: 1701 - protein, 5 aa, Artificial Sequence
  synthetic polypeptide
TYGMH

SEQ ID NO: 1702 - protein, 17 aa, Artificial Sequence
  synthetic polypeptide
VIWYEGSNKYYGESVKG

SEQ ID NO: 1703 - protein, 11 aa, Artificial Sequence
  synthetic polypeptide
DNSHYYYGMDV

SEQ ID NO: 1704 - protein, 7 aa, Artificial Sequence
  synthetic polypeptide
SGVYYWS

SEQ ID NO: 1705 - protein, 16 aa, Artificial Sequence
  synthetic polypeptide
YIYYSGSTSYNPSLKS

SEQ ID NO: 1706 - protein, 10 aa, Artificial Sequence
  synthetic polypeptide
SGYSYALFDY

SEQ ID NO: 1707 - protein, 7 aa, Artificial Sequence
  synthetic polypeptide
SGGYYWS

SEQ ID NO: 1708 - protein, 16 aa, Artificial Sequence
  synthetic polypeptide
YIFYSGSTDYNPSLKS

SEQ ID NO: 1709 - protein, 10 aa, Artificial Sequence
  synthetic polypeptide
SGYSYALFDA

SEQ ID NO: 1710 - protein, 5 aa, Artificial Sequence
  synthetic polypeptide
NYWMH

SEQ ID NO: 1711 - protein, 17 aa, Artificial Sequence
  synthetic polypeptide
TISTDNSRTYYADSVKG

SEQ ID NO: 1712 - protein, 6 aa, Artificial Sequence
  synthetic polypeptide
GSDYEH

SEQ ID NO: 1713 - protein, 5 aa, Artificial Sequence
  synthetic polypeptide
VYYMN

SEQ ID NO: 1714 - protein, 17 aa, Artificial Sequence
  synthetic polypeptide
DINNEGGTTYYADSVKG

SEQ ID NO: 1715 - protein, 13 aa, Artificial Sequence
  synthetic polypeptide
DAGYSNHVPIFDS

SEQ ID NO: 1716 - protein, 5 aa, Artificial Sequence
  synthetic polypeptide
VYYMN

SEQ ID NO: 1717 - protein, 17 aa, Artificial Sequence
  synthetic polypeptide
DINNEGDTTYYADSVKG

SEQ ID NO: 1718 - protein, 13 aa, Artificial Sequence
  synthetic polypeptide
DAGYSNHVPIFDS

SEQ ID NO: 1719 - protein, 5 aa, Artificial Sequence
  synthetic polypeptide
VYYMN

SEQ ID NO: 1720 - protein, 17 aa, Artificial Sequence
  synthetic polypeptide
DINNEGDTTYYADSVKG

SEQ ID NO: 1721 - protein, 13 aa, Artificial Sequence
  synthetic polypeptide
DAGYSNHVPIFDS

SEQ ID NO: 1722 - protein, 5 aa, Artificial Sequence
  synthetic polypeptide
DYAMS

SEQ ID NO: 1723 - protein, 17 aa, Artificial Sequence
  synthetic polypeptide
SIYMYDSSTYYADSVKG

SEQ ID NO: 1724 - protein, 19 aa, Artificial Sequence
  synthetic polypeptide
DINRSYGSSWSHFGPIFSS

SEQ ID NO: 1725 - protein, 5 aa, Artificial Sequence
  synthetic polypeptide
TYAMS

SEQ ID NO: 1726 - protein, 17 aa, Artificial Sequence
  synthetic polypeptide
AISWSGGETFYAESMKG

SEQ ID NO: 1727 - protein, 10 aa, Artificial Sequence
  synthetic polypeptide
GMGLAEGLTD

SEQ ID NO: 1728 - protein, 5 aa, Artificial Sequence
  synthetic polypeptide
NPAMS

SEQ ID NO: 1729 - protein, 17 aa, Artificial Sequence
  synthetic polypeptide
EITNYGYNRYYADSVKG

SEQ ID NO: 1730 - protein, 10 aa, Artificial Sequence
  synthetic polypeptide
SLGLEYGYGD

SEQ ID NO: 1731 - protein, 5 aa, Artificial Sequence
  synthetic polypeptide
SYYID

SEQ ID NO: 1732 - protein, 17 aa, Artificial Sequence
  synthetic polypeptide
RIDPEDGGTKYAQKFQG

SEQ ID NO: 1733 - protein, 7 aa, Artificial Sequence
  synthetic polypeptide
RRRDFDY

SEQ ID NO: 1734 - protein, 7 aa, Artificial Sequence
  synthetic polypeptide
TSYYYWS

SEQ ID NO: 1735 - protein, 16 aa, Artificial Sequence
  synthetic polypeptide
AIGSRGSTYYSPSLKT

SEQ ID NO: 1736 - protein, 21 aa, Artificial Sequence
  synthetic polypeptide
VTGEITYNSGSYYYTLNLFDY

SEQ ID NO: 1737 - protein, 5 aa, Artificial Sequence
  synthetic polypeptide
SYAMS

SEQ ID NO: 1738 - protein, 17 aa, Artificial Sequence
  synthetic polypeptide
DINSGGGSTKYNDSVKG

SEQ ID NO: 1739 - protein, 14 aa, Artificial Sequence
  synthetic polypeptide
EGGSGRYWTNEYDY

SEQ ID NO: 1740 - protein, 5 aa, Artificial Sequence
  synthetic polypeptide
SSAMS

SEQ ID NO: 1741 - protein, 17 aa, Artificial Sequence
  synthetic polypeptide
SIYSDSSYTYYADSVKS

SEQ ID NO: 1742 - protein, 10 aa, Artificial Sequence
  synthetic polypeptide
SSDYEGSFAS

SEQ ID NO: 1743 - protein, 5 aa, Artificial Sequence
  synthetic polypeptide
GSAMS

SEQ ID NO: 1744 - protein, 17 aa, Artificial Sequence
  synthetic polypeptide
SIYSHSMYTYYADSVKS

SEQ ID NO: 1745 - protein, 10 aa, Artificial Sequence
  synthetic polypeptide
SSDYEGLFVS

SEQ ID NO: 1746 - protein, 5 aa, Artificial Sequence
  synthetic polypeptide
VYYMN

SEQ ID NO: 1747 - protein, 17 aa, Artificial Sequence
  synthetic polypeptide
DINNEGGTTYYADSVKG

SEQ ID NO: 1748 - protein, 13 aa, Artificial Sequence
  synthetic polypeptide
DAGYSNHVPIFDS

SEQ ID NO: 1749 - protein, 5 aa, Artificial Sequence
  synthetic polypeptide
VYYMN

SEQ ID NO: 1750 - protein, 17 aa, Artificial Sequence
  synthetic polypeptide
DINNEGGTTYYADSVKG

SEQ ID NO: 1751 - protein, 13 aa, Artificial Sequence
  synthetic polypeptide
DAGYSNHVPIFDS

SEQ ID NO: 1752 - protein, 5 aa, Artificial Sequence
  synthetic polypeptide
VYYMN

SEQ ID NO: 1753 - protein, 17 aa, Artificial Sequence
  synthetic polypeptide
DINNEGGTTYYADSVKG

SEQ ID NO: 1754 - protein, 13 aa, Artificial Sequence
  synthetic polypeptide
DAGYSNHVPIFDS

SEQ ID NO: 1755 - protein, 5 aa, Artificial Sequence
  synthetic polypeptide
DYAMS

SEQ ID NO: 1756 - protein, 17 aa, Artificial Sequence
  synthetic polypeptide
SIYMYDSSTYYADSVKG

SEQ ID NO: 1757 - protein, 19 aa, Artificial Sequence
  synthetic polypeptide
DINRSYGSSWSHFGPIFSS

SEQ ID NO: 1758 - protein, 5 aa, Artificial Sequence
  synthetic polypeptide
DYAMS

SEQ ID NO: 1759 - protein, 17 aa, Artificial Sequence
  synthetic polypeptide
SIYMYDSSTYYADSVKG

SEQ ID NO: 1760 - protein, 19 aa, Artificial Sequence
  synthetic polypeptide
DINRSYGSSWSHFGPIFSS

SEQ ID NO: 1761 - protein, 5 aa, Artificial Sequence
  synthetic polypeptide
AYYMN

SEQ ID NO: 1762 - protein, 17 aa, Artificial Sequence
  synthetic polypeptide
DINNEGYETYYADSVKG

SEQ ID NO: 1763 - protein, 13 aa, Artificial Sequence
  synthetic polypeptide
DAGYSNHVQIFDS

SEQ ID NO: 1764 - protein, 5 aa, Artificial Sequence
  synthetic polypeptide
AYYMN

SEQ ID NO: 1765 - protein, 17 aa, Artificial Sequence
  synthetic polypeptide
DINNEGYETYYADSVKG

SEQ ID NO: 1766 - protein, 13 aa, Artificial Sequence
  synthetic polypeptide
DAGYSNHVQIFDS

SEQ ID NO: 1767 - protein, 5 aa, Artificial Sequence
  synthetic polypeptide
AYYMN

SEQ ID NO: 1768 - protein, 17 aa, Artificial Sequence
  synthetic polypeptide
DINNEGYETYYADSVKG

SEQ ID NO: 1769 - protein, 13 aa, Artificial Sequence
  synthetic polypeptide
DAGYSNHVQIFDS

SEQ ID NO: 1770 - protein, 5 aa, Artificial Sequence
  synthetic polypeptide
AYYMN

SEQ ID NO: 1771 - protein, 17 aa, Artificial Sequence
  synthetic polypeptide
DINNEGYETYYADSVKG

SEQ ID NO: 1772 - protein, 13 aa, Artificial Sequence
  synthetic polypeptide
DAGYSNHVQIFDS

SEQ ID NO: 1773 - protein, 5 aa, Artificial Sequence
  synthetic polypeptide
AYYMN

SEQ ID NO: 1774 - protein, 17 aa, Artificial Sequence
  synthetic polypeptide
DINNEGYETYYADSVKG

SEQ ID NO: 1775 - protein, 13 aa, Artificial Sequence
  synthetic polypeptide
DAGYSNHVQIFDS

SEQ ID NO: 1776 - protein, 5 aa, Artificial Sequence
  synthetic polypeptide
HYAMS

SEQ ID NO: 1777 - protein, 17 aa, Artificial Sequence
  synthetic polypeptide
GDNTYDGGTRYQDSVKG

SEQ ID NO: 1778 - protein, 14 aa, Artificial Sequence
  synthetic polypeptide
DTGRGIMGEYGMDY

SEQ ID NO: 1779 - protein, 5 aa, Artificial Sequence
  synthetic polypeptide
ISEMT

SEQ ID NO: 1780 - protein, 19 aa, Artificial Sequence
  synthetic polypeptide
GISGVTGGSSTSYADSVKG

SEQ ID NO: 1781 - protein, 13 aa, Artificial Sequence
  synthetic polypeptide
TSGTYYFIPEYEY

SEQ ID NO: 1782 - protein, 5 aa, Artificial Sequence
  synthetic polypeptide
VYYMN

SEQ ID NO: 1783 - protein, 17 aa, Artificial Sequence
  synthetic polypeptide
DINNEGGTTYYADSVKG

SEQ ID NO: 1784 - protein, 13 aa, Artificial Sequence
  synthetic polypeptide
DAGYSNHVPIFDS

SEQ ID NO: 1785 - protein, 5 aa, Artificial Sequence
  synthetic polypeptide
VYYMN

SEQ ID NO: 1786 - protein, 17 aa, Artificial Sequence
  synthetic polypeptide
DINNEGGTTYYADSVKG

SEQ ID NO: 1787 - protein, 13 aa, Artificial Sequence
  synthetic polypeptide
DAGYSNHVPIFDS

SEQ ID NO: 1788 - protein, 5 aa, Artificial Sequence
  synthetic polypeptide
VYYMN

SEQ ID NO: 1789 - protein, 17 aa, Artificial Sequence
  synthetic polypeptide
DINNEGGTTYYADSVKG

SEQ ID NO: 1790 - protein, 13 aa, Artificial Sequence
  synthetic polypeptide
DAGYSNHVPIFDS

SEQ ID NO: 1791 - protein, 5 aa, Artificial Sequence
  synthetic polypeptide
VYYMN

SEQ ID NO: 1792 - protein, 17 aa, Artificial Sequence
  synthetic polypeptide
DINNEGGTTYYADSVKG

SEQ ID NO: 1793 - protein, 13 aa, Artificial Sequence
  synthetic polypeptide
DAGYSNHVPIFDS

SEQ ID NO: 1794 - protein, 5 aa, Artificial Sequence
  synthetic polypeptide
VYYMN

SEQ ID NO: 1795 - protein, 17 aa, Artificial Sequence
  synthetic polypeptide
DINNEGGTTYYADSVKG

SEQ ID NO: 1796 - protein, 13 aa, Artificial Sequence
  synthetic polypeptide
DAGYSNHVPIFDS

SEQ ID NO: 1797 - protein, 5 aa, Artificial Sequence
  synthetic polypeptide
VYYMN

SEQ ID NO: 1798 - protein, 17 aa, Artificial Sequence
  synthetic polypeptide
DINNEGGTTYYADSVKG

SEQ ID NO: 1799 - protein, 13 aa, Artificial Sequence
  synthetic polypeptide
DAGYSNHVPIFDS

SEQ ID NO: 1800 - protein, 5 aa, Artificial Sequence
  synthetic polypeptide
VYYMN

SEQ ID NO: 1801 - protein, 17 aa, Artificial Sequence
  synthetic polypeptide
DINNEGGTTYYADSVKG

SEQ ID NO: 1802 - protein, 13 aa, Artificial Sequence
  synthetic polypeptide
DAGYSNHVPIFDS

SEQ ID NO: 1803 - protein, 5 aa, Artificial Sequence
  synthetic polypeptide
VYYMN

SEQ ID NO: 1804 - protein, 17 aa, Artificial Sequence
  synthetic polypeptide
DINNEGGTTYYADSVKG

SEQ ID NO: 1805 - protein, 13 aa, Artificial Sequence
  synthetic polypeptide
DAGYSNHVPIFDS

SEQ ID NO: 1806 - protein, 5 aa, Artificial Sequence
  synthetic polypeptide
VYYMN

SEQ ID NO: 1807 - protein, 17 aa, Artificial Sequence
  synthetic polypeptide
DINNEGGTTYYADSVKG

SEQ ID NO: 1808 - protein, 13 aa, Artificial Sequence
  synthetic polypeptide
DAGYSNHVPIFDS

SEQ ID NO: 1809 - protein, 5 aa, Artificial Sequence
  synthetic polypeptide
GYYMN

SEQ ID NO: 1810 - protein, 30 aa, Artificial Sequence
  synthetic polypeptide
QVQLQESGPGLVKPSQTLSLACTVSGGSIT

SEQ ID NO: 1811 - protein, 13 aa, Artificial Sequence
  synthetic polypeptide
DAGYSNHVPIFDS

SEQ ID NO: 1812 - protein, 5 aa, Artificial Sequence
  synthetic polypeptide
VYYMN

SEQ ID NO: 1813 - protein, 17 aa, Artificial Sequence
  synthetic polypeptide
DINNEGGTTYYADSVKG

SEQ ID NO: 1814 - protein, 13 aa, Artificial Sequence
  synthetic polypeptide
DAGYSNHVPIFDS

SEQ ID NO: 1815 - protein, 5 aa, Artificial Sequence
  synthetic polypeptide
VYYMN

SEQ ID NO: 1816 - protein, 17 aa, Artificial Sequence
  synthetic polypeptide
DINNEGGTTYYADSVKG

SEQ ID NO: 1817 - protein, 13 aa, Artificial Sequence
  synthetic polypeptide
DAGYSNHVPIFDS

SEQ ID NO: 1818 - protein, 5 aa, Artificial Sequence
  synthetic polypeptide
VYYMN

SEQ ID NO: 1819 - protein, 17 aa, Artificial Sequence
  synthetic polypeptide
DINNEGGTTYYADSVKG

SEQ ID NO: 1820 - protein, 13 aa, Artificial Sequence
  synthetic polypeptide
DAGYSNHVPIFDS

SEQ ID NO: 1821 - protein, 5 aa, Artificial Sequence
  synthetic polypeptide
VYYMN

SEQ ID NO: 1822 - protein, 17 aa, Artificial Sequence
  synthetic polypeptide
DINNEGGTTYYADSVKG

SEQ ID NO: 1823 - protein, 13 aa, Artificial Sequence
  synthetic polypeptide
DAGYSNHVPIFDS

SEQ ID NO: 1824 - protein, 5 aa, Artificial Sequence
  synthetic polypeptide
VYYMN

SEQ ID NO: 1825 - protein, 17 aa, Artificial Sequence
  synthetic polypeptide
DINNEGGTTYYADSVKG

SEQ ID NO: 1826 - protein, 13 aa, Artificial Sequence
  synthetic polypeptide
DAGYSNHVPIFDS

SEQ ID NO: 1827 - protein, 5 aa, Artificial Sequence
  synthetic polypeptide
VYYMN

SEQ ID NO: 1828 - protein, 17 aa, Artificial Sequence
  synthetic polypeptide
DINNEGGATYYADSVKG

SEQ ID NO: 1829 - protein, 13 aa, Artificial Sequence
  synthetic polypeptide
DAGYSNHVPIFDS

SEQ ID NO: 1830 - protein, 5 aa, Artificial Sequence
  synthetic polypeptide
VYYMN

SEQ ID NO: 1831 - protein, 17 aa, Artificial Sequence
  synthetic polypeptide
DINNEGGATYYADSVKG

SEQ ID NO: 1832 - protein, 13 aa, Artificial Sequence
  synthetic polypeptide
DAGYSNHVPIFDS

SEQ ID NO: 1833 - protein, 5 aa, Artificial Sequence
  synthetic polypeptide
VYYMN

SEQ ID NO: 1834 - protein, 17 aa, Artificial Sequence
  synthetic polypeptide
DINNEGGTTYYADSVKG

SEQ ID NO: 1835 - protein, 13 aa, Artificial Sequence
  synthetic polypeptide
DAGYSNHVPIFDS

SEQ ID NO: 1836 - protein, 5 aa, Artificial Sequence
  synthetic polypeptide
VYYMN

SEQ ID NO: 1837 - protein, 17 aa, Artificial Sequence
  synthetic polypeptide
DINNEGGTTYYADSVKG

SEQ ID NO: 1838 - protein, 13 aa, Artificial Sequence
  synthetic polypeptide
DAGYSNHVPIFDS

SEQ ID NO: 1839 - protein, 5 aa, Artificial Sequence
  synthetic polypeptide
VYYMN

SEQ ID NO: 1840 - protein, 17 aa, Artificial Sequence
  synthetic polypeptide
DINNEGGTTYYADSVKG

SEQ ID NO: 1841 - protein, 13 aa, Artificial Sequence
  synthetic polypeptide
DAGYSNHVPIFDS

SEQ ID NO: 1842 - protein, 5 aa, Artificial Sequence
  synthetic polypeptide
VYYMN

SEQ ID NO: 1843 - protein, 17 aa, Artificial Sequence
  synthetic polypeptide
DINNEGGTTYYADSVKG

SEQ ID NO: 1844 - protein, 13 aa, Artificial Sequence
  synthetic polypeptide
DAGYSNHVPIFDS

SEQ ID NO: 1845 - protein, 5 aa, Artificial Sequence
  synthetic polypeptide
VYYMN

SEQ ID NO: 1846 - protein, 17 aa, Artificial Sequence
  synthetic polypeptide
DINNEGGTTYYADSVKG

SEQ ID NO: 1847 - protein, 13 aa, Artificial Sequence
  synthetic polypeptide
DAGYSNHVPIFDS

SEQ ID NO: 1848 - protein, 5 aa, Artificial Sequence
  synthetic polypeptide
NYGMN

SEQ ID NO: 1849 - protein, 17 aa, Artificial Sequence
  synthetic polypeptide
WINTYTGEPTYADAFKG

SEQ ID NO: 1850 - protein, 9 aa, Artificial Sequence
  synthetic polypeptide
DYGDYGMDY

SEQ ID NO: 1851 - protein, 10 aa, Artificial Sequence
  synthetic polypeptide
GYTFTNYGMN

SEQ ID NO: 1852 - protein, 6 aa, Artificial Sequence
  synthetic polypeptide
NTYTGE

SEQ ID NO: 1853 - protein, 14 aa, Artificial Sequence
  synthetic polypeptide
CARDYGDYGMDYWG

SEQ ID NO: 1854 - protein, 5 aa, Artificial Sequence
  synthetic polypeptide
NYGMN

SEQ ID NO: 1855 - protein, 17 aa, Artificial Sequence
  synthetic polypeptide
WINTYTGEPTYADAFKG

SEQ ID NO: 1856 - protein, 9 aa, Artificial Sequence
  synthetic polypeptide
DYGDYGMDY

SEQ ID NO: 1857 - protein, 14 aa, Artificial Sequence
  synthetic polypeptide
TGSSSNIGAGYDVN

SEQ ID NO: 1858 - protein, 7 aa, Artificial Sequence
  synthetic polypeptide
VNNNRPS

SEQ ID NO: 1859 - protein, 11 aa, Artificial Sequence
  synthetic polypeptide
QSYDTSLSASV

SEQ ID NO: 1860 - protein, 11 aa, Artificial Sequence
  synthetic polypeptide
RASQGISNYLA

SEQ ID NO: 1861 - protein, 7 aa, Artificial Sequence
  synthetic polypeptide
AASSLQG

SEQ ID NO: 1862 - protein, 9 aa, Artificial Sequence
  synthetic polypeptide
QQYYNYPFT

SEQ ID NO: 1863 - protein, 12 aa, Artificial Sequence
  synthetic polypeptide
RASQSLRRIYLA

SEQ ID NO: 1864 - protein, 7 aa, Artificial Sequence
  synthetic polypeptide
DVFDRAT

SEQ ID NO: 1865 - protein, 9 aa, Artificial Sequence
  synthetic polypeptide
QQYSDSPFT

SEQ ID NO: 1866 - protein, 13 aa, Artificial Sequence
  synthetic polypeptide
SGSSSNIGINYVY

SEQ ID NO: 1867 - protein, 7 aa, Artificial Sequence
  synthetic polypeptide
RSDQRPS

SEQ ID NO: 1868 - protein, 11 aa, Artificial Sequence
  synthetic polypeptide
AAWDDSLSGVV

SEQ ID NO: 1869 - protein, 11 aa, Artificial Sequence
  synthetic polypeptide
RASQFIGRYFN

SEQ ID NO: 1870 - protein, 7 aa, Artificial Sequence
  synthetic polypeptide
AESSLQS

SEQ ID NO: 1871 - protein, 9 aa, Artificial Sequence
  synthetic polypeptide
QQSYSTPWT

SEQ ID NO: 1872 - protein, 11 aa, Artificial Sequence
  synthetic polypeptide
RASQFIGRYFN

SEQ ID NO: 1873 - protein, 7 aa, Artificial Sequence
  synthetic polypeptide
AESSLQS

SEQ ID NO: 1874 - protein, 9 aa, Artificial Sequence
  synthetic polypeptide
QQSYSTPFT

SEQ ID NO: 1875 - protein, 13 aa, Artificial Sequence
  synthetic polypeptide
SGSSSNIGTNTVN

SEQ ID NO: 1876 - protein, 7 aa, Artificial Sequence
  synthetic polypeptide
INNQRPS

SEQ ID NO: 1877 - protein, 11 aa, Artificial Sequence
  synthetic polypeptide
ATWDDSLNGPV

SEQ ID NO: 1878 - protein, 11 aa, Artificial Sequence
  synthetic polypeptide
RASQGISNYLA

SEQ ID NO: 1879 - protein, 7 aa, Artificial Sequence
  synthetic polypeptide
AASSLQG

SEQ ID NO: 1880 - protein, 9 aa, Artificial Sequence
  synthetic polypeptide
QQYYNYPFT

SEQ ID NO: 1881 - protein, 13 aa, Artificial Sequence
  synthetic polypeptide
SGSSSNIGINYVY

SEQ ID NO: 1882 - protein, 7 aa, Artificial Sequence
  synthetic polypeptide
RSDQRPS

SEQ ID NO: 1883 - protein, 11 aa, Artificial Sequence
  synthetic polypeptide
AAWDDSLSGVV

SEQ ID NO: 1884 - protein, 11 aa, Artificial Sequence
  synthetic polypeptide
RASQFIGRYFN

SEQ ID NO: 1885 - protein, 7 aa, Artificial Sequence
  synthetic polypeptide
AESSLQS

SEQ ID NO: 1886 - protein, 9 aa, Artificial Sequence
  synthetic polypeptide
QQSYSTPWT

SEQ ID NO: 1887 - protein, 14 aa, Artificial Sequence
  synthetic polypeptide
TGSSSNIGAGYDVN

SEQ ID NO: 1888 - protein, 7 aa, Artificial Sequence
  synthetic polypeptide
VNNNRPS

SEQ ID NO: 1889 - protein, 11 aa, Artificial Sequence
  synthetic polypeptide
QSYETSLSASV

SEQ ID NO: 1890 - protein, 11 aa, Artificial Sequence
  synthetic polypeptide
RASQGINNYLA

SEQ ID NO: 1891 - protein, 7 aa, Artificial Sequence
  synthetic polypeptide
AVSILQS

SEQ ID NO: 1892 - protein, 9 aa, Artificial Sequence
  synthetic polypeptide
QQYNFYPFS

SEQ ID NO: 1893 - protein, 12 aa, Artificial Sequence
  synthetic polypeptide
RAGQSVRSSYLG

SEQ ID NO: 1894 - protein, 7 aa, Artificial Sequence
  synthetic polypeptide
GASSRAT

SEQ ID NO: 1895 - protein, 9 aa, Artificial Sequence
  synthetic polypeptide
QQYGYSPPT

SEQ ID NO: 1896 - protein, 12 aa, Artificial Sequence
  synthetic polypeptide
RASQSVRSSYLA

SEQ ID NO: 1897 - protein, 7 aa, Artificial Sequence
  synthetic polypeptide
GASSRAT

SEQ ID NO: 1898 - protein, 9 aa, Artificial Sequence
  synthetic polypeptide
QQYGDLPFT

SEQ ID NO: 1899 - protein, 12 aa, Artificial Sequence
  synthetic polypeptide
RASQSVRSSYLA

SEQ ID NO: 1900 - protein, 7 aa, Artificial Sequence
  synthetic polypeptide
GASSRAT

SEQ ID NO: 1901 - protein, 9 aa, Artificial Sequence
  synthetic polypeptide
QQYGSSPFT

SEQ ID NO: 1902 - protein, 12 aa, Artificial Sequence
  synthetic polypeptide
RASQSIRSSYLA

SEQ ID NO: 1903 - protein, 7 aa, Artificial Sequence
  synthetic polypeptide
GASSRAT

SEQ ID NO: 1904 - protein, 9 aa, Artificial Sequence
  synthetic polypeptide
QQYGDLPFT

SEQ ID NO: 1905 - protein, 12 aa, Artificial Sequence
  synthetic polypeptide
RASQSVRSSYLA

SEQ ID NO: 1906 - protein, 7 aa, Artificial Sequence
  synthetic polypeptide
GASSRAT

SEQ ID NO: 1907 - protein, 9 aa, Artificial Sequence
  synthetic polypeptide
QQYGSSPFT

SEQ ID NO: 1908 - protein, 12 aa, Artificial Sequence
  synthetic polypeptide
RASQSVRSTYLA

SEQ ID NO: 1909 - protein, 7 aa, Artificial Sequence
  synthetic polypeptide
DASSRAT

SEQ ID NO: 1910 - protein, 9 aa, Artificial Sequence
  synthetic polypeptide
QQYGSSPPT

SEQ ID NO: 1911 - protein, 12 aa, Artificial Sequence
  synthetic polypeptide
RASQSVRSSYLA

SEQ ID NO: 1912 - protein, 7 aa, Artificial Sequence
  synthetic polypeptide
GASSRAT

SEQ ID NO: 1913 - protein, 9 aa, Artificial Sequence
  synthetic polypeptide
QQYGDLPFT

SEQ ID NO: 1914 - protein, 12 aa, Artificial Sequence
  synthetic polypeptide
RASQGVRSDYLA

SEQ ID NO: 1915 - protein, 7 aa, Artificial Sequence
  synthetic polypeptide
GASSRAT

SEQ ID NO: 1916 - protein, 9 aa, Artificial Sequence
  synthetic polypeptide
QQYGSTPPT

SEQ ID NO: 1917 - protein, 12 aa, Artificial Sequence
  synthetic polypeptide
RASQSVRSTYLA

SEQ ID NO: 1918 - protein, 7 aa, Artificial Sequence
  synthetic polypeptide
GASSRAT

SEQ ID NO: 1919 - protein, 9 aa, Artificial Sequence
  synthetic polypeptide
QQYGDLPFT

SEQ ID NO: 1920 - protein, 12 aa, Artificial Sequence
  synthetic polypeptide
RASQSVRSNYLA

SEQ ID NO: 1921 - protein, 7 aa, Artificial Sequence
  synthetic polypeptide
GASSRAT

SEQ ID NO: 1922 - protein, 9 aa, Artificial Sequence
  synthetic polypeptide
QQYGDLPFT

SEQ ID NO: 1923 - protein, 12 aa, Artificial Sequence
  synthetic polypeptide
RASQSVRSSYLA

SEQ ID NO: 1924 - protein, 7 aa, Artificial Sequence
  synthetic polypeptide
GASSRAT

SEQ ID NO: 1925 - protein, 9 aa, Artificial Sequence
  synthetic polypeptide
QQYGDLPFT

SEQ ID NO: 1926 - protein, 12 aa, Artificial Sequence
  synthetic polypeptide
RASQSVRSSYLA

SEQ ID NO: 1927 - protein, 7 aa, Artificial Sequence
  synthetic polypeptide
GASSRAT

SEQ ID NO: 1928 - protein, 9 aa, Artificial Sequence
  synthetic polypeptide
QQYGDLPFT

SEQ ID NO: 1929 - protein, 12 aa, Artificial Sequence
  synthetic polypeptide
RASQSVRSNYLA

SEQ ID NO: 1930 - protein, 7 aa, Artificial Sequence
  synthetic polypeptide
GASSRAT

SEQ ID NO: 1931 - protein, 9 aa, Artificial Sequence
  synthetic polypeptide
QQYGDLPFT

SEQ ID NO: 1932 - protein, 12 aa, Artificial Sequence
  synthetic polypeptide
RASQSVRSSYLA

SEQ ID NO: 1933 - protein, 7 aa, Artificial Sequence
  synthetic polypeptide
GASSRAT

SEQ ID NO: 1934 - protein, 9 aa, Artificial Sequence
  synthetic polypeptide
QQYGSSPFT

SEQ ID NO: 1935 - protein, 12 aa, Artificial Sequence
  synthetic polypeptide
RASQSIRSNYLA

SEQ ID NO: 1936 - protein, 7 aa, Artificial Sequence
  synthetic polypeptide
GASSRAT

SEQ ID NO: 1937 - protein, 9 aa, Artificial Sequence
  synthetic polypeptide
QQYGSSPFT

SEQ ID NO: 1938 - protein, 12 aa, Artificial Sequence
  synthetic polypeptide
RASQSVRSNYLA

SEQ ID NO: 1939 - protein, 7 aa, Artificial Sequence
  synthetic polypeptide
GASNRAT

SEQ ID NO: 1940 - protein, 9 aa, Artificial Sequence
  synthetic polypeptide
QQYGISPPT

SEQ ID NO: 1941 - protein, 12 aa, Artificial Sequence
  synthetic polypeptide
RASQSVRSSYLA

SEQ ID NO: 1942 - protein, 7 aa, Artificial Sequence
  synthetic polypeptide
GASSRAT

SEQ ID NO: 1943 - protein, 9 aa, Artificial Sequence
  synthetic polypeptide
EQYGNSPPT

SEQ ID NO: 1944 - protein, 12 aa, Artificial Sequence
  synthetic polypeptide
RASQSVRSSYLA

SEQ ID NO: 1945 - protein, 7 aa, Artificial Sequence
  synthetic polypeptide
GASSRAT

SEQ ID NO: 1946 - protein, 9 aa, Artificial Sequence
  synthetic polypeptide
QQYGSSPPP

SEQ ID NO: 1947 - protein, 11 aa, Artificial Sequence
  synthetic polypeptide
RASQSVSSNLA

SEQ ID NO: 1948 - protein, 7 aa, Artificial Sequence
  synthetic polypeptide
GSSSRAT

SEQ ID NO: 1949 - protein, 9 aa, Artificial Sequence
  synthetic polypeptide
QQYGSSPPP

SEQ ID NO: 1950 - protein, 12 aa, Artificial Sequence
  synthetic polypeptide
RASQGVRSDYLA

SEQ ID NO: 1951 - protein, 7 aa, Artificial Sequence
  synthetic polypeptide
GASSRAT

SEQ ID NO: 1952 - protein, 9 aa, Artificial Sequence
  synthetic polypeptide
QQYGSTPPT

SEQ ID NO: 1953 - protein, 11 aa, Artificial Sequence
  synthetic polypeptide
RASQSVSSNLA

SEQ ID NO: 1954 - protein, 7 aa, Artificial Sequence
  synthetic polypeptide
GASSRAT

SEQ ID NO: 1955 - protein, 9 aa, Artificial Sequence
  synthetic polypeptide
QQYYSTPFT

SEQ ID NO: 1956 - protein, 11 aa, Artificial Sequence
  synthetic polypeptide
RASQSVSSNLA

SEQ ID NO: 1957 - protein, 7 aa, Artificial Sequence
  synthetic polypeptide
GASTRAT

SEQ ID NO: 1958 - protein, 9 aa, Artificial Sequence
  synthetic polypeptide
QQYYSTPFT

SEQ ID NO: 1959 - protein, 12 aa, Artificial Sequence
  synthetic polypeptide
RASQSVSSAYLA

SEQ ID NO: 1960 - protein, 7 aa, Artificial Sequence
  synthetic polypeptide
GASSRAT

SEQ ID NO: 1961 - protein, 9 aa, Artificial Sequence
  synthetic polypeptide
QQFGSSPFT

SEQ ID NO: 1962 - protein, 12 aa, Artificial Sequence
  synthetic polypeptide
RASQSVRGSYLA

SEQ ID NO: 1963 - protein, 7 aa, Artificial Sequence
  synthetic polypeptide
SASSRAT

SEQ ID NO: 1964 - protein, 9 aa, Artificial Sequence
  synthetic polypeptide
QQYGDSPFT

SEQ ID NO: 1965 - protein, 12 aa, Artificial Sequence
  synthetic polypeptide
RASQGVRSSYFA

SEQ ID NO: 1966 - protein, 7 aa, Artificial Sequence
  synthetic polypeptide
GASTRAT

SEQ ID NO: 1967 - protein, 9 aa, Artificial Sequence
  synthetic polypeptide
QQYGSSPPT

SEQ ID NO: 1968 - protein, 12 aa, Artificial Sequence
  synthetic polypeptide
RASQSIRSNYLA

SEQ ID NO: 1969 - protein, 7 aa, Artificial Sequence
  synthetic polypeptide
GASSRAT

SEQ ID NO: 1970 - protein, 9 aa, Artificial Sequence
  synthetic polypeptide
QQYGSSPPS

SEQ ID NO: 1971 - protein, 12 aa, Artificial Sequence
  synthetic polypeptide
RASQSVRSSYLA

SEQ ID NO: 1972 - protein, 7 aa, Artificial Sequence
  synthetic polypeptide
GASSRAT

SEQ ID NO: 1973 - protein, 9 aa, Artificial Sequence
  synthetic polypeptide
QQYGDLPFT

SEQ ID NO: 1974 - protein, 12 aa, Artificial Sequence
  synthetic polypeptide
RASQSIRSSYLA

SEQ ID NO: 1975 - protein, 7 aa, Artificial Sequence
  synthetic polypeptide
GASSRAT

SEQ ID NO: 1976 - protein, 9 aa, Artificial Sequence
  synthetic polypeptide
QQYGDLPFT

SEQ ID NO: 1977 - protein, 12 aa, Artificial Sequence
  synthetic polypeptide
RASQSVRSSYLA

SEQ ID NO: 1978 - protein, 7 aa, Artificial Sequence
  synthetic polypeptide
GASSRAT

SEQ ID NO: 1979 - protein, 9 aa, Artificial Sequence
  synthetic polypeptide
QQYGDLPFT

SEQ ID NO: 1980 - protein, 12 aa, Artificial Sequence
  synthetic polypeptide
RASQGVRSSYLA

SEQ ID NO: 1981 - protein, 7 aa, Artificial Sequence
  synthetic polypeptide
GASSRAT

SEQ ID NO: 1982 - protein, 9 aa, Artificial Sequence
  synthetic polypeptide
QQYGSSPPT

SEQ ID NO: 1983 - protein, 12 aa, Artificial Sequence
  synthetic polypeptide
RASQSVRSNYLA

SEQ ID NO: 1984 - protein, 7 aa, Artificial Sequence
  synthetic polypeptide
GASSRAT

SEQ ID NO: 1985 - protein, 9 aa, Artificial Sequence
  synthetic polypeptide
QQYGSSPPT

SEQ ID NO: 1986 - protein, 11 aa, Artificial Sequence
  synthetic polypeptide
RASQDISNYLN

SEQ ID NO: 1987 - protein, 7 aa, Artificial Sequence
  synthetic polypeptide
AASSLQS

SEQ ID NO: 1988 - protein, 9 aa, Artificial Sequence
  synthetic polypeptide
QQSYISPPT

SEQ ID NO: 1989 - protein, 11 aa, Artificial Sequence
  synthetic polypeptide
RASQSISSYLN

SEQ ID NO: 1990 - protein, 7 aa, Artificial Sequence
  synthetic polypeptide
AASSLQS

SEQ ID NO: 1991 - protein, 9 aa, Artificial Sequence
  synthetic polypeptide
QQSYISPPT

SEQ ID NO: 1992 - protein, 11 aa, Artificial Sequence
  synthetic polypeptide
RASQSISSYLN

SEQ ID NO: 1993 - protein, 7 aa, Artificial Sequence
  synthetic polypeptide
AASSLQS

SEQ ID NO: 1994 - protein, 9 aa, Artificial Sequence
  synthetic polypeptide
QQSYSAPPT

SEQ ID NO: 1995 - protein, 11 aa, Artificial Sequence
  synthetic polypeptide
RASQSISSYLN

SEQ ID NO: 1996 - protein, 7 aa, Artificial Sequence
  synthetic polypeptide
AASSLQS

SEQ ID NO: 1997 - protein, 9 aa, Artificial Sequence
  synthetic polypeptide
QQSYSTPLT

SEQ ID NO: 1998 - protein, 11 aa, Artificial Sequence
  synthetic polypeptide
RASQGISNYLA

SEQ ID NO: 1999 - protein, 7 aa, Artificial Sequence
  synthetic polypeptide
AASILQS

SEQ ID NO: 2000 - protein, 9 aa, Artificial Sequence
  synthetic polypeptide
QQYFAYPIT

SEQ ID NO: 2001 - protein, 11 aa, Artificial Sequence
  synthetic polypeptide
RASQSISSYLN

SEQ ID NO: 2002 - protein, 7 aa, Artificial Sequence
  synthetic polypeptide
AASSLQS

SEQ ID NO: 2003 - protein, 9 aa, Artificial Sequence
  synthetic polypeptide
QQSYSTPIT

SEQ ID NO: 2004 - protein, 11 aa, Artificial Sequence
  synthetic polypeptide
RASQSISSYLN

SEQ ID NO: 2005 - protein, 7 aa, Artificial Sequence
  synthetic polypeptide
AASSLQS

SEQ ID NO: 2006 - protein, 9 aa, Artificial Sequence
  synthetic polypeptide
QQSYSTPFT

SEQ ID NO: 2007 - protein, 11 aa, Artificial Sequence
  synthetic polypeptide
GGNNIGSKSVH

SEQ ID NO: 2008 - protein, 7 aa, Artificial Sequence
  synthetic polypeptide
DDSDRPS

SEQ ID NO: 2009 - protein, 12 aa, Artificial Sequence
  synthetic polypeptide
QVWDRSSDQDVV

SEQ ID NO: 2010 - protein, 11 aa, Artificial Sequence
  synthetic polypeptide
GGNNIGSKSVH

SEQ ID NO: 2011 - protein, 7 aa, Artificial Sequence
  synthetic polypeptide
DDSDRPS

SEQ ID NO: 2012 - protein, 12 aa, Artificial Sequence
  synthetic polypeptide
QVWDRSSDQDVV

SEQ ID NO: 2013 - protein, 12 aa, Artificial Sequence
  synthetic polypeptide
RASQSVRSSYLA

SEQ ID NO: 2014 - protein, 7 aa, Artificial Sequence
  synthetic polypeptide
GASSRAT

SEQ ID NO: 2015 - protein, 9 aa, Artificial Sequence
  synthetic polypeptide
QQYGSSPPT

SEQ ID NO: 2016 - protein, 12 aa, Artificial Sequence
  synthetic polypeptide
RASQSVRSSYVA

SEQ ID NO: 2017 - protein, 7 aa, Artificial Sequence
  synthetic polypeptide
GASSRAT

SEQ ID NO: 2018 - protein, 9 aa, Artificial Sequence
  synthetic polypeptide
QQYGDLPFT

SEQ ID NO: 2019 - protein, 11 aa, Artificial Sequence
  synthetic polypeptide
RASQSISSYLN

SEQ ID NO: 2020 - protein, 7 aa, Artificial Sequence
  synthetic polypeptide
AASSLQS

SEQ ID NO: 2021 - protein, 9 aa, Artificial Sequence
  synthetic polypeptide
QQSYSTPFT

SEQ ID NO: 2022 - protein, 11 aa, Artificial Sequence
  synthetic polypeptide
RASQSIFDYLN

SEQ ID NO: 2023 - protein, 7 aa, Artificial Sequence
  synthetic polypeptide
AASSLQS

SEQ ID NO: 2024 - protein, 9 aa, Artificial Sequence
  synthetic polypeptide
QQSYSTPLT

SEQ ID NO: 2025 - protein, 14 aa, Artificial Sequence
  synthetic polypeptide
TGSSSNIGAAYDVH

SEQ ID NO: 2026 - protein, 7 aa, Artificial Sequence
  synthetic polypeptide
VNSHRPP

SEQ ID NO: 2027 - protein, 11 aa, Artificial Sequence
  synthetic polypeptide
LSYDNSLSGSV

SEQ ID NO: 2028 - protein, 11 aa, Artificial Sequence
  synthetic polypeptide
RASQSISSYLN

SEQ ID NO: 2029 - protein, 7 aa, Artificial Sequence
  synthetic polypeptide
AASNLQS

SEQ ID NO: 2030 - protein, 9 aa, Artificial Sequence
  synthetic polypeptide
QQSFSSPRT

SEQ ID NO: 2031 - protein, 11 aa, Artificial Sequence
  synthetic polypeptide
RASQIISSYLN

SEQ ID NO: 2032 - protein, 7 aa, Artificial Sequence
  synthetic polypeptide
GASSMQS

SEQ ID NO: 2033 - protein, 9 aa, Artificial Sequence
  synthetic polypeptide
QQSYSIPRT

SEQ ID NO: 2034 - protein, 16 aa, Artificial Sequence
  synthetic polypeptide
RSSQSLLHSNGYNYLD

SEQ ID NO: 2035 - protein, 7 aa, Artificial Sequence
  synthetic polypeptide
LGSNRAS

SEQ ID NO: 2036 - protein, 9 aa, Artificial Sequence
  synthetic polypeptide
MQGLRTPFT

SEQ ID NO: 2037 - protein, 11 aa, Artificial Sequence
  synthetic polypeptide
RASQSISNYLN

SEQ ID NO: 2038 - protein, 7 aa, Artificial Sequence
  synthetic polypeptide
AASSLQS

SEQ ID NO: 2039 - protein, 9 aa, Artificial Sequence
  synthetic polypeptide
QQSYIIPPT

SEQ ID NO: 2040 - protein, 11 aa, Artificial Sequence
  synthetic polypeptide
RASQGISNYLA

SEQ ID NO: 2041 - protein, 7 aa, Artificial Sequence
  synthetic polypeptide
AASTLQS

SEQ ID NO: 2042 - protein, 9 aa, Artificial Sequence
  synthetic polypeptide
QQYYSTPLT

SEQ ID NO: 2043 - protein, 12 aa, Artificial Sequence
  synthetic polypeptide
RASQSFRSSYLA

SEQ ID NO: 2044 - protein, 7 aa, Artificial Sequence
  synthetic polypeptide
GASSRAT

SEQ ID NO: 2045 - protein, 9 aa, Artificial Sequence
  synthetic polypeptide
QLYGSLPIT

SEQ ID NO: 2046 - protein, 12 aa, Artificial Sequence
  synthetic polypeptide
RASQSVRSSYLA

SEQ ID NO: 2047 - protein, 7 aa, Artificial Sequence
  synthetic polypeptide
GASSRAT

SEQ ID NO: 2048 - protein, 9 aa, Artificial Sequence
  synthetic polypeptide
QQYGDLPFT

SEQ ID NO: 2049 - protein, 12 aa, Artificial Sequence
  synthetic polypeptide
RASQSVSSAYLA

SEQ ID NO: 2050 - protein, 7 aa, Artificial Sequence
  synthetic polypeptide
GASSRAT

SEQ ID NO: 2051 - protein, 9 aa, Artificial Sequence
  synthetic polypeptide
QQFGSSPFT

SEQ ID NO: 2052 - protein, 12 aa, Artificial Sequence
  synthetic polypeptide
RASQSVRGSYLA

SEQ ID NO: 2053 - protein, 7 aa, Artificial Sequence
  synthetic polypeptide
SASSRAT

SEQ ID NO: 2054 - protein, 9 aa, Artificial Sequence
  synthetic polypeptide
QQYGDSPFT

SEQ ID NO: 2055 - protein, 11 aa, Artificial Sequence
  synthetic polypeptide
RASQDISNYLN

SEQ ID NO: 2056 - protein, 7 aa, Artificial Sequence
  synthetic polypeptide
AASSLQS

SEQ ID NO: 2057 - protein, 9 aa, Artificial Sequence
  synthetic polypeptide
QQSYISPPT

SEQ ID NO: 2058 - protein, 11 aa, Artificial Sequence
  synthetic polypeptide
RASQGISNYLA

SEQ ID NO: 2059 - protein, 7 aa, Artificial Sequence
  synthetic polypeptide
AASILQS

SEQ ID NO: 2060 - protein, 9 aa, Artificial Sequence
  synthetic polypeptide
QQYFAYPIT

SEQ ID NO: 2061 - protein, 11 aa, Artificial Sequence
  synthetic polypeptide
GGNNIGSKSVH

SEQ ID NO: 2062 - protein, 7 aa, Artificial Sequence
  synthetic polypeptide
DDSDRPS

SEQ ID NO: 2063 - protein, 12 aa, Artificial Sequence
  synthetic polypeptide
QVWDRSSDQDVV

SEQ ID NO: 2064 - protein, 11 aa, Artificial Sequence
  synthetic polypeptide
RASQSISSYLN

SEQ ID NO: 2065 - protein, 7 aa, Artificial Sequence
  synthetic polypeptide
AASSLQS

SEQ ID NO: 2066 - protein, 9 aa, Artificial Sequence
  synthetic polypeptide
QQSYSTPFT

SEQ ID NO: 2067 - protein, 11 aa, Artificial Sequence
  synthetic polypeptide
RASQSIFDYLN

SEQ ID NO: 2068 - protein, 7 aa, Artificial Sequence
  synthetic polypeptide
AASSLQS

SEQ ID NO: 2069 - protein, 9 aa, Artificial Sequence
  synthetic polypeptide
QQSYSTPLT

SEQ ID NO: 2070 - protein, 16 aa, Artificial Sequence
  synthetic polypeptide
RSSQSLLHSNGYNYLD

SEQ ID NO: 2071 - protein, 7 aa, Artificial Sequence
  synthetic polypeptide
LGSNRAS

SEQ ID NO: 2072 - protein, 9 aa, Artificial Sequence
  synthetic polypeptide
MQGLRTPFT

SEQ ID NO: 2073 - protein, 11 aa, Artificial Sequence
  synthetic polypeptide
RASQGISNYLA

SEQ ID NO: 2074 - protein, 7 aa, Artificial Sequence
  synthetic polypeptide
AASTLQS

SEQ ID NO: 2075 - protein, 9 aa, Artificial Sequence
  synthetic polypeptide
QQYYSTPLT

SEQ ID NO: 2076 - protein, 12 aa, Artificial Sequence
  synthetic polypeptide
RASQSVRGNYLA

SEQ ID NO: 2077 - protein, 7 aa, Artificial Sequence
  synthetic polypeptide
GASSRAT

SEQ ID NO: 2078 - protein, 9 aa, Artificial Sequence
  synthetic polypeptide
QQYGYSPFT

SEQ ID NO: 2079 - protein, 12 aa, Artificial Sequence
  synthetic polypeptide
RAGQSVRSSYLG

SEQ ID NO: 2080 - protein, 7 aa, Artificial Sequence
  synthetic polypeptide
GASSRAT

SEQ ID NO: 2081 - protein, 9 aa, Artificial Sequence
  synthetic polypeptide
QQYGYSPPT

SEQ ID NO: 2082 - protein, 12 aa, Artificial Sequence
  synthetic polypeptide
RASQSVRSSYLA

SEQ ID NO: 2083 - protein, 7 aa, Artificial Sequence
  synthetic polypeptide
GASSRAT

SEQ ID NO: 2084 - protein, 9 aa, Artificial Sequence
  synthetic polypeptide
QQYGDLPFT

SEQ ID NO: 2085 - protein, 12 aa, Artificial Sequence
  synthetic polypeptide
RASQSVRSSYLA

SEQ ID NO: 2086 - protein, 7 aa, Artificial Sequence
  synthetic polypeptide
GASSRAT

SEQ ID NO: 2087 - protein, 9 aa, Artificial Sequence
  synthetic polypeptide
QQYGSSPFT

SEQ ID NO: 2088 - protein, 12 aa, Artificial Sequence
  synthetic polypeptide
RASQSIRSSYLA

SEQ ID NO: 2089 - protein, 7 aa, Artificial Sequence
  synthetic polypeptide
GASSRAT

SEQ ID NO: 2090 - protein, 9 aa, Artificial Sequence
  synthetic polypeptide
QQYGDLPFT

SEQ ID NO: 2091 - protein, 12 aa, Artificial Sequence
  synthetic polypeptide
RASQSVRSSYLA

SEQ ID NO: 2092 - protein, 7 aa, Artificial Sequence
  synthetic polypeptide
GASSRAT

SEQ ID NO: 2093 - protein, 9 aa, Artificial Sequence
  synthetic polypeptide
QQYGSSPFT

SEQ ID NO: 2094 - protein, 12 aa, Artificial Sequence
  synthetic polypeptide
RASQSVRSTYLA

SEQ ID NO: 2095 - protein, 7 aa, Artificial Sequence
  synthetic polypeptide
DASSRAT

SEQ ID NO: 2096 - protein, 9 aa, Artificial Sequence
  synthetic polypeptide
QQYGSSPPT

SEQ ID NO: 2097 - protein, 12 aa, Artificial Sequence
  synthetic polypeptide
RASQSVRSSYLA

SEQ ID NO: 2098 - protein, 7 aa, Artificial Sequence
  synthetic polypeptide
GASSRAT

SEQ ID NO: 2099 - protein, 9 aa, Artificial Sequence
  synthetic polypeptide
QQYGDLPFT

SEQ ID NO: 2100 - protein, 12 aa, Artificial Sequence
  synthetic polypeptide
RASQSVRSTYLA

SEQ ID NO: 2101 - protein, 7 aa, Artificial Sequence
  synthetic polypeptide
GASSRAT

SEQ ID NO: 2102 - protein, 9 aa, Artificial Sequence
  synthetic polypeptide
QQYGDLPFT

SEQ ID NO: 2103 - protein, 12 aa, Artificial Sequence
  synthetic polypeptide
RASQSVRSNYLA

SEQ ID NO: 2104 - protein, 7 aa, Artificial Sequence
  synthetic polypeptide
GASSRAT

SEQ ID NO: 2105 - protein, 9 aa, Artificial Sequence
  synthetic polypeptide
QQYGDLPFT

SEQ ID NO: 2106 - protein, 12 aa, Artificial Sequence
  synthetic polypeptide
RASQSVRSSYLA

SEQ ID NO: 2107 - protein, 7 aa, Artificial Sequence
  synthetic polypeptide
GASSRAT

SEQ ID NO: 2108 - protein, 9 aa, Artificial Sequence
  synthetic polypeptide
QQYGDLPFT

SEQ ID NO: 2109 - protein, 12 aa, Artificial Sequence
  synthetic polypeptide
RASQSVRSNYLA

SEQ ID NO: 2110 - protein, 7 aa, Artificial Sequence
  synthetic polypeptide
GASSRAT

SEQ ID NO: 2111 - protein, 9 aa, Artificial Sequence
  synthetic polypeptide
QQYGDLPFT

SEQ ID NO: 2112 - protein, 12 aa, Artificial Sequence
  synthetic polypeptide
RASQSVRSSYLA

SEQ ID NO: 2113 - protein, 7 aa, Artificial Sequence
  synthetic polypeptide
GASSRAT

SEQ ID NO: 2114 - protein, 9 aa, Artificial Sequence
  synthetic polypeptide
QQYGSSPFT

SEQ ID NO: 2115 - protein, 12 aa, Artificial Sequence
  synthetic polypeptide
RASQSVRGNYLA

SEQ ID NO: 2116 - protein, 7 aa, Artificial Sequence
  synthetic polypeptide
GASSRAT

SEQ ID NO: 2117 - protein, 9 aa, Artificial Sequence
  synthetic polypeptide
QQYGYSPFT

SEQ ID NO: 2118 - protein, 12 aa, Artificial Sequence
  synthetic polypeptide
RASQSIRSNYLA

SEQ ID NO: 2119 - protein, 7 aa, Artificial Sequence
  synthetic polypeptide
GASSRAT

SEQ ID NO: 2120 - protein, 9 aa, Artificial Sequence
  synthetic polypeptide
QQYGSSPFT

SEQ ID NO: 2121 - protein, 12 aa, Artificial Sequence
  synthetic polypeptide
RASQSVRSNYLA

SEQ ID NO: 2122 - protein, 7 aa, Artificial Sequence
  synthetic polypeptide
GASNRAT

SEQ ID NO: 2123 - protein, 9 aa, Artificial Sequence
  synthetic polypeptide
QQYGISPPT

SEQ ID NO: 2124 - protein, 11 aa, Artificial Sequence
  synthetic polypeptide
RASQSVSSNLA

SEQ ID NO: 2125 - protein, 7 aa, Artificial Sequence
  synthetic polypeptide
GSSSRAT

SEQ ID NO: 2126 - protein, 9 aa, Artificial Sequence
  synthetic polypeptide
QQYGSSPPP

SEQ ID NO: 2127 - protein, 12 aa, Artificial Sequence
  synthetic polypeptide
RASQGVRSDYLA

SEQ ID NO: 2128 - protein, 7 aa, Artificial Sequence
  synthetic polypeptide
GASSRAT

SEQ ID NO: 2129 - protein, 9 aa, Artificial Sequence
  synthetic polypeptide
QQYGSTPPT

SEQ ID NO: 2130 - protein, 12 aa, Artificial Sequence
  synthetic polypeptide
RASQGVRSSYFA

SEQ ID NO: 2131 - protein, 7 aa, Artificial Sequence
  synthetic polypeptide
GASTRAT

SEQ ID NO: 2132 - protein, 9 aa, Artificial Sequence
  synthetic polypeptide
QQYGSSPPT

SEQ ID NO: 2133 - protein, 12 aa, Artificial Sequence
  synthetic polypeptide
RASQSIRSNYLA

SEQ ID NO: 2134 - protein, 7 aa, Artificial Sequence
  synthetic polypeptide
GASSRAT

SEQ ID NO: 2135 - protein, 9 aa, Artificial Sequence
  synthetic polypeptide
QQYGSSPPS

SEQ ID NO: 2136 - protein, 12 aa, Artificial Sequence
  synthetic polypeptide
RASQSVRSSYLA

SEQ ID NO: 2137 - protein, 7 aa, Artificial Sequence
  synthetic polypeptide
GASSRAT

SEQ ID NO: 2138 - protein, 9 aa, Artificial Sequence
  synthetic polypeptide
QQYGDLPFT

SEQ ID NO: 2139 - protein, 12 aa, Artificial Sequence
  synthetic polypeptide
RASQSVRSSYLA

SEQ ID NO: 2140 - protein, 7 aa, Artificial Sequence
  synthetic polypeptide
GASSRAT

SEQ ID NO: 2141 - protein, 9 aa, Artificial Sequence
  synthetic polypeptide
QQYGDLPFT

SEQ ID NO: 2142 - protein, 12 aa, Artificial Sequence
  synthetic polypeptide
RASQGVRSSYLA

SEQ ID NO: 2143 - protein, 7 aa, Artificial Sequence
  synthetic polypeptide
GASSRAT

SEQ ID NO: 2144 - protein, 9 aa, Artificial Sequence
  synthetic polypeptide
QQYGSSPPT

SEQ ID NO: 2145 - protein, 12 aa, Artificial Sequence
  synthetic polypeptide
RASQSVRSNYLA

SEQ ID NO: 2146 - protein, 7 aa, Artificial Sequence
  synthetic polypeptide
GASSRAT

SEQ ID NO: 2147 - protein, 9 aa, Artificial Sequence
  synthetic polypeptide
QQYGSSPPT

SEQ ID NO: 2148 - protein, 11 aa, Artificial Sequence
  synthetic polypeptide
RASQGISNYLA

SEQ ID NO: 2149 - protein, 7 aa, Artificial Sequence
  synthetic polypeptide
AASILQS

SEQ ID NO: 2150 - protein, 9 aa, Artificial Sequence
  synthetic polypeptide
QQYFAYPIT

SEQ ID NO: 2151 - protein, 12 aa, Artificial Sequence
  synthetic polypeptide
RASQSVRSSYLA

SEQ ID NO: 2152 - protein, 7 aa, Artificial Sequence
  synthetic polypeptide
GASSRAT

SEQ ID NO: 2153 - protein, 9 aa, Artificial Sequence
  synthetic polypeptide
QQYGSSPPT

SEQ ID NO: 2154 - protein, 12 aa, Artificial Sequence
  synthetic polypeptide
RASQSVRSSYVA

SEQ ID NO: 2155 - protein, 7 aa, Artificial Sequence
  synthetic polypeptide
GASSRAT

SEQ ID NO: 2156 - protein, 9 aa, Artificial Sequence
  synthetic polypeptide
QQYGDLPFT

SEQ ID NO: 2157 - protein, 11 aa, Artificial Sequence
  synthetic polypeptide
RASQSISSYLN

SEQ ID NO: 2158 - protein, 7 aa, Artificial Sequence
  synthetic polypeptide
AASNLQS

SEQ ID NO: 2159 - protein, 9 aa, Artificial Sequence
  synthetic polypeptide
QQSFSSPRT

SEQ ID NO: 2160 - protein, 11 aa, Artificial Sequence
  synthetic polypeptide
RASQGISNYLA

SEQ ID NO: 2161 - protein, 7 aa, Artificial Sequence
  synthetic polypeptide
AASTLQS

SEQ ID NO: 2162 - protein, 9 aa, Artificial Sequence
  synthetic polypeptide
QQYYSTPLT

SEQ ID NO: 2163 - protein, 12 aa, Artificial Sequence
  synthetic polypeptide
RASQSVRSSYLA

SEQ ID NO: 2164 - protein, 7 aa, Artificial Sequence
  synthetic polypeptide
GASSRAT

SEQ ID NO: 2165 - protein, 9 aa, Artificial Sequence
  synthetic polypeptide
QQYGDLPFT

SEQ ID NO: 2166 - protein, 11 aa, Artificial Sequence
  synthetic polypeptide
RASQSISSYLN

SEQ ID NO: 2167 - protein, 7 aa, Artificial Sequence
  synthetic polypeptide
AASSLQS

SEQ ID NO: 2168 - protein, 9 aa, Artificial Sequence
  synthetic polypeptide
QQSYSTPFT

SEQ ID NO: 2169 - protein, 12 aa, Artificial Sequence
  synthetic polypeptide
RASQSLRRIYLA

SEQ ID NO: 2170 - protein, 7 aa, Artificial Sequence
  synthetic polypeptide
DVFDRAT

SEQ ID NO: 2171 - protein, 9 aa, Artificial Sequence
  synthetic polypeptide
QQYSESPFT

SEQ ID NO: 2172 - protein, 13 aa, Artificial Sequence
  synthetic polypeptide
SGSSSNIGINYVY

SEQ ID NO: 2173 - protein, 7 aa, Artificial Sequence
  synthetic polypeptide
RSDQRPS

SEQ ID NO: 2174 - protein, 11 aa, Artificial Sequence
  synthetic polypeptide
AAFDESLSGVV

SEQ ID NO: 2175 - protein, 11 aa, Artificial Sequence
  synthetic polypeptide
RASQGINNYLA

SEQ ID NO: 2176 - protein, 7 aa, Artificial Sequence
  synthetic polypeptide
AVSILQS

SEQ ID NO: 2177 - protein, 9 aa, Artificial Sequence
  synthetic polypeptide
QQYNFYPFS

SEQ ID NO: 2178 - protein, 11 aa, Artificial Sequence
  synthetic polypeptide
RTSQYIGRYLN

SEQ ID NO: 2179 - protein, 7 aa, Artificial Sequence
  synthetic polypeptide
GASTLQQ

SEQ ID NO: 2180 - protein, 9 aa, Artificial Sequence
  synthetic polypeptide
QQTYSTPRT

SEQ ID NO: 2181 - protein, 14 aa, Artificial Sequence
  synthetic polypeptide
TGSSSNIGAGYDVN

SEQ ID NO: 2182 - protein, 7 aa, Artificial Sequence
  synthetic polypeptide
VNNNRPS

SEQ ID NO: 2183 - protein, 11 aa, Artificial Sequence
  synthetic polypeptide
QSYDTSLSASV

SEQ ID NO: 2184 - protein, 14 aa, Artificial Sequence
  synthetic polypeptide
TGSSSNIGAGYDVN

SEQ ID NO: 2185 - protein, 7 aa, Artificial Sequence
  synthetic polypeptide
VNNNRPS

SEQ ID NO: 2186 - protein, 11 aa, Artificial Sequence
  synthetic polypeptide
QSYETSLSASV

SEQ ID NO: 2187 - protein, 11 aa, Artificial Sequence
  synthetic polypeptide
RASQSVDRYFN

SEQ ID NO: 2188 - protein, 7 aa, Artificial Sequence
  synthetic polypeptide
AASSLQS

SEQ ID NO: 2189 - protein, 9 aa, Artificial Sequence
  synthetic polypeptide
QQSYSTPWT

SEQ ID NO: 2190 - protein, 11 aa, Artificial Sequence
  synthetic polypeptide
RASQFIGRYFN

SEQ ID NO: 2191 - protein, 7 aa, Artificial Sequence
  synthetic polypeptide
AESSLQS

SEQ ID NO: 2192 - protein, 9 aa, Artificial Sequence
  synthetic polypeptide
QQSYSTPWT

SEQ ID NO: 2193 - protein, 12 aa, Artificial Sequence
  synthetic polypeptide
RAGQSVRSSYLG

SEQ ID NO: 2194 - protein, 7 aa, Artificial Sequence
  synthetic polypeptide
GASSRAT

SEQ ID NO: 2195 - protein, 9 aa, Artificial Sequence
  synthetic polypeptide
QQYGYSPPT

SEQ ID NO: 2196 - protein, 12 aa, Artificial Sequence
  synthetic polypeptide
RASQSVRSSYLA

SEQ ID NO: 2197 - protein, 7 aa, Artificial Sequence
  synthetic polypeptide
GASSRAT

SEQ ID NO: 2198 - protein, 9 aa, Artificial Sequence
  synthetic polypeptide
QQYGDLPFT

SEQ ID NO: 2199 - protein, 12 aa, Artificial Sequence
  synthetic polypeptide
RASQSVRSSYLA

SEQ ID NO: 2200 - protein, 7 aa, Artificial Sequence
  synthetic polypeptide
GASSRAT

SEQ ID NO: 2201 - protein, 9 aa, Artificial Sequence
  synthetic polypeptide
QQYGSSPFT

SEQ ID NO: 2202 - protein, 12 aa, Artificial Sequence
  synthetic polypeptide
RASQSIRSSYLA

SEQ ID NO: 2203 - protein, 7 aa, Artificial Sequence
  synthetic polypeptide
GASSRAT

SEQ ID NO: 2204 - protein, 9 aa, Artificial Sequence
  synthetic polypeptide
QQYGDLPFT

SEQ ID NO: 2205 - protein, 12 aa, Artificial Sequence
  synthetic polypeptide
RASQSVRSSYLA

SEQ ID NO: 2206 - protein, 7 aa, Artificial Sequence
  synthetic polypeptide
GASSRAT

SEQ ID NO: 2207 - protein, 9 aa, Artificial Sequence
  synthetic polypeptide
QQYGSSPFT

SEQ ID NO: 2208 - protein, 12 aa, Artificial Sequence
  synthetic polypeptide
RASQSVRSTYLA

SEQ ID NO: 2209 - protein, 7 aa, Artificial Sequence
  synthetic polypeptide
DASSRAT

SEQ ID NO: 2210 - protein, 9 aa, Artificial Sequence
  synthetic polypeptide
QQYGSSPPT

SEQ ID NO: 2211 - protein, 12 aa, Artificial Sequence
  synthetic polypeptide
RASQSVRSSYLA

SEQ ID NO: 2212 - protein, 7 aa, Artificial Sequence
  synthetic polypeptide
GASSRAT

SEQ ID NO: 2213 - protein, 9 aa, Artificial Sequence
  synthetic polypeptide
QQYGDLPFT

SEQ ID NO: 2214 - protein, 12 aa, Artificial Sequence
  synthetic polypeptide
RASQSVRSTYLA

SEQ ID NO: 2215 - protein, 7 aa, Artificial Sequence
  synthetic polypeptide
GASSRAT

SEQ ID NO: 2216 - protein, 9 aa, Artificial Sequence
  synthetic polypeptide
QQYGDLPFT

SEQ ID NO: 2217 - protein, 12 aa, Artificial Sequence
  synthetic polypeptide
RASQSVRSNYLA

SEQ ID NO: 2218 - protein, 7 aa, Artificial Sequence
  synthetic polypeptide
GASSRAT

SEQ ID NO: 2219 - protein, 9 aa, Artificial Sequence
  synthetic polypeptide
QQYGDLPFT

SEQ ID NO: 2220 - protein, 12 aa, Artificial Sequence
  synthetic polypeptide
RASQSVRSSYLA

SEQ ID NO: 2221 - protein, 7 aa, Artificial Sequence
  synthetic polypeptide
GASSRAT

SEQ ID NO: 2222 - protein, 9 aa, Artificial Sequence
  synthetic polypeptide
QQYGDLPFT

SEQ ID NO: 2223 - protein, 12 aa, Artificial Sequence
  synthetic polypeptide
RASQSVRSNYLA

SEQ ID NO: 2224 - protein, 7 aa, Artificial Sequence
  synthetic polypeptide
GASSRAT

SEQ ID NO: 2225 - protein, 9 aa, Artificial Sequence
  synthetic polypeptide
QQYGDLPFT

SEQ ID NO: 2226 - protein, 12 aa, Artificial Sequence
  synthetic polypeptide
RASQSVRSSYLA

SEQ ID NO: 2227 - protein, 7 aa, Artificial Sequence
  synthetic polypeptide
GASSRAT

SEQ ID NO: 2228 - protein, 9 aa, Artificial Sequence
  synthetic polypeptide
QQYGSSPFT

SEQ ID NO: 2229 - protein, 12 aa, Artificial Sequence
  synthetic polypeptide
RASQSVRGNYLA

SEQ ID NO: 2230 - protein, 7 aa, Artificial Sequence
  synthetic polypeptide
GASSRAT

SEQ ID NO: 2231 - protein, 9 aa, Artificial Sequence
  synthetic polypeptide
QQYGYSPFT

SEQ ID NO: 2232 - protein, 12 aa, Artificial Sequence
  synthetic polypeptide
RASQSVRGNYLA

SEQ ID NO: 2233 - protein, 7 aa, Artificial Sequence
  synthetic polypeptide
GASSRAT

SEQ ID NO: 2234 - protein, 9 aa, Artificial Sequence
  synthetic polypeptide
QQYGYSPFT

SEQ ID NO: 2235 - protein, 12 aa, Artificial Sequence
  synthetic polypeptide
RASQSIRSNYLA

SEQ ID NO: 2236 - protein, 7 aa, Artificial Sequence
  synthetic polypeptide
GASSRAT

SEQ ID NO: 2237 - protein, 9 aa, Artificial Sequence
  synthetic polypeptide
QQYGSSPFT

SEQ ID NO: 2238 - protein, 12 aa, Artificial Sequence
  synthetic polypeptide
RASQSVRSNYLA

SEQ ID NO: 2239 - protein, 7 aa, Artificial Sequence
  synthetic polypeptide
GASNRAT

SEQ ID NO: 2240 - protein, 9 aa, Artificial Sequence
  synthetic polypeptide
QQYGISPPT

SEQ ID NO: 2241 - protein, 11 aa, Artificial Sequence
  synthetic polypeptide
RASQSVSSNLA

SEQ ID NO: 2242 - protein, 7 aa, Artificial Sequence
  synthetic polypeptide
GSSSRAT

SEQ ID NO: 2243 - protein, 9 aa, Artificial Sequence
  synthetic polypeptide
QQYGSSPPP

SEQ ID NO: 2244 - protein, 12 aa, Artificial Sequence
  synthetic polypeptide
RASQGVRSDYLA

SEQ ID NO: 2245 - protein, 7 aa, Artificial Sequence
  synthetic polypeptide
GASSRAT

SEQ ID NO: 2246 - protein, 9 aa, Artificial Sequence
  synthetic polypeptide
QQYGSTPPT

SEQ ID NO: 2247 - protein, 12 aa, Artificial Sequence
  synthetic polypeptide
RASQGVRSSYFA

SEQ ID NO: 2248 - protein, 7 aa, Artificial Sequence
  synthetic polypeptide
GASTRAT

SEQ ID NO: 2249 - protein, 9 aa, Artificial Sequence
  synthetic polypeptide
QQYGSSPPT

SEQ ID NO: 2250 - protein, 12 aa, Artificial Sequence
  synthetic polypeptide
RASQSIRSNYLA

SEQ ID NO: 2251 - protein, 7 aa, Artificial Sequence
  synthetic polypeptide
GASSRAT

SEQ ID NO: 2252 - protein, 9 aa, Artificial Sequence
  synthetic polypeptide
QQYGSSPPS

SEQ ID NO: 2253 - protein, 12 aa, Artificial Sequence
  synthetic polypeptide
RASQSVRSSYLA

SEQ ID NO: 2254 - protein, 7 aa, Artificial Sequence
  synthetic polypeptide
GASSRAT

SEQ ID NO: 2255 - protein, 9 aa, Artificial Sequence
  synthetic polypeptide
QQYGDLPFT

SEQ ID NO: 2256 - protein, 12 aa, Artificial Sequence
  synthetic polypeptide
RASQSVRSSYLA

SEQ ID NO: 2257 - protein, 7 aa, Artificial Sequence
  synthetic polypeptide
GASSRAT

SEQ ID NO: 2258 - protein, 9 aa, Artificial Sequence
  synthetic polypeptide
QQYGDLPFT

SEQ ID NO: 2259 - protein, 12 aa, Artificial Sequence
  synthetic polypeptide
RASQGVRSSYLA

SEQ ID NO: 2260 - protein, 7 aa, Artificial Sequence
  synthetic polypeptide
GASSRAT

SEQ ID NO: 2261 - protein, 9 aa, Artificial Sequence
  synthetic polypeptide
QQYGSSPPT

SEQ ID NO: 2262 - protein, 12 aa, Artificial Sequence
  synthetic polypeptide
RASQSVRSNYLA

SEQ ID NO: 2263 - protein, 7 aa, Artificial Sequence
  synthetic polypeptide
GASSRAT

SEQ ID NO: 2264 - protein, 9 aa, Artificial Sequence
  synthetic polypeptide
QQYGSSPPT

SEQ ID NO: 2265 - protein, 11 aa, Artificial Sequence
  synthetic polypeptide
RASQGISNYLA

SEQ ID NO: 2266 - protein, 7 aa, Artificial Sequence
  synthetic polypeptide
AASILQS

SEQ ID NO: 2267 - protein, 9 aa, Artificial Sequence
  synthetic polypeptide
QQYFAYPIT

SEQ ID NO: 2268 - protein, 12 aa, Artificial Sequence
  synthetic polypeptide
RASQSVRSSYLA

SEQ ID NO: 2269 - protein, 7 aa, Artificial Sequence
  synthetic polypeptide
GASSRAT

SEQ ID NO: 2270 - protein, 9 aa, Artificial Sequence
  synthetic polypeptide
QQYGSSPPT

SEQ ID NO: 2271 - protein, 12 aa, Artificial Sequence
  synthetic polypeptide
RASQSVRSSYVA

SEQ ID NO: 2272 - protein, 7 aa, Artificial Sequence
  synthetic polypeptide
GASSRAT

SEQ ID NO: 2273 - protein, 9 aa, Artificial Sequence
  synthetic polypeptide
QQYGDLPFT

SEQ ID NO: 2274 - protein, 11 aa, Artificial Sequence
  synthetic polypeptide
RASQSISSYLN

SEQ ID NO: 2275 - protein, 7 aa, Artificial Sequence
  synthetic polypeptide
AASNLQS

SEQ ID NO: 2276 - protein, 9 aa, Artificial Sequence
  synthetic polypeptide
QQSFSSPRT

SEQ ID NO: 2277 - protein, 11 aa, Artificial Sequence
  synthetic polypeptide
RASQGISNYLA

SEQ ID NO: 2278 - protein, 7 aa, Artificial Sequence
  synthetic polypeptide
AASTLQS

SEQ ID NO: 2279 - protein, 9 aa, Artificial Sequence
  synthetic polypeptide
QQYYSTPLT

SEQ ID NO: 2280 - protein, 12 aa, Artificial Sequence
  synthetic polypeptide
RASQSVRSSYLA

SEQ ID NO: 2281 - protein, 7 aa, Artificial Sequence
  synthetic polypeptide
GASSRAT

SEQ ID NO: 2282 - protein, 9 aa, Artificial Sequence
  synthetic polypeptide
QQYGDLPFT

SEQ ID NO: 2283 - protein, 11 aa, Artificial Sequence
  synthetic polypeptide
RASQSISSYLN

SEQ ID NO: 2284 - protein, 7 aa, Artificial Sequence
  synthetic polypeptide
AASSLQS

SEQ ID NO: 2285 - protein, 9 aa, Artificial Sequence
  synthetic polypeptide
QQSYSTPFT

SEQ ID NO: 2286 - protein, 12 aa, Artificial Sequence
  synthetic polypeptide
RAGQSVRSSYLG

SEQ ID NO: 2287 - protein, 7 aa, Artificial Sequence
  synthetic polypeptide
GASSRAT

SEQ ID NO: 2288 - protein, 9 aa, Artificial Sequence
  synthetic polypeptide
QQYGYSPPT

SEQ ID NO: 2289 - protein, 12 aa, Artificial Sequence
  synthetic polypeptide
RASQSVRSSYLA

SEQ ID NO: 2290 - protein, 7 aa, Artificial Sequence
  synthetic polypeptide
GASSRAT

SEQ ID NO: 2291 - protein, 9 aa, Artificial Sequence
  synthetic polypeptide
QQYGDLPFT

SEQ ID NO: 2292 - protein, 12 aa, Artificial Sequence
  synthetic polypeptide
RASQSVRSSYLA

SEQ ID NO: 2293 - protein, 7 aa, Artificial Sequence
  synthetic polypeptide
GASSRAT

SEQ ID NO: 2294 - protein, 9 aa, Artificial Sequence
  synthetic polypeptide
QQYGSSPFT

SEQ ID NO: 2295 - protein, 12 aa, Artificial Sequence
  synthetic polypeptide
RASQSIRSSYLA

SEQ ID NO: 2296 - protein, 7 aa, Artificial Sequence
  synthetic polypeptide
GASSRAT

SEQ ID NO: 2297 - protein, 9 aa, Artificial Sequence
  synthetic polypeptide
QQYGDLPFT

SEQ ID NO: 2298 - protein, 12 aa, Artificial Sequence
  synthetic polypeptide
RASQSVRSSYLA

SEQ ID NO: 2299 - protein, 7 aa, Artificial Sequence
  synthetic polypeptide
GASSRAT

SEQ ID NO: 2300 - protein, 9 aa, Artificial Sequence
  synthetic polypeptide
QQYGSSPFT

SEQ ID NO: 2301 - protein, 12 aa, Artificial Sequence
  synthetic polypeptide
RASQSVRSSYLA

SEQ ID NO: 2302 - protein, 7 aa, Artificial Sequence
  synthetic polypeptide
GASSRAT

SEQ ID NO: 2303 - protein, 9 aa, Artificial Sequence
  synthetic polypeptide
QQYGDLPFT

SEQ ID NO: 2304 - protein, 12 aa, Artificial Sequence
  synthetic polypeptide
RASQSVRSTYLA

SEQ ID NO: 2305 - protein, 7 aa, Artificial Sequence
  synthetic polypeptide
GASSRAT

SEQ ID NO: 2306 - protein, 9 aa, Artificial Sequence
  synthetic polypeptide
QQYGDLPFT

SEQ ID NO: 2307 - protein, 12 aa, Artificial Sequence
  synthetic polypeptide
RASQSVRSNYLA

SEQ ID NO: 2308 - protein, 7 aa, Artificial Sequence
  synthetic polypeptide
GASSRAT

SEQ ID NO: 2309 - protein, 9 aa, Artificial Sequence
  synthetic polypeptide
QQYGDLPFT

SEQ ID NO: 2310 - protein, 12 aa, Artificial Sequence
  synthetic polypeptide
RASQSVRSSYLA

SEQ ID NO: 2311 - protein, 7 aa, Artificial Sequence
  synthetic polypeptide
GASSRAT

SEQ ID NO: 2312 - protein, 9 aa, Artificial Sequence
  synthetic polypeptide
QQYGDLPFT

SEQ ID NO: 2313 - protein, 12 aa, Artificial Sequence
  synthetic polypeptide
RASQSVRSNYLA

SEQ ID NO: 2314 - protein, 7 aa, Artificial Sequence
  synthetic polypeptide
GASSRAT

SEQ ID NO: 2315 - protein, 9 aa, Artificial Sequence
  synthetic polypeptide
QQYGDLPFT

SEQ ID NO: 2316 - protein, 12 aa, Artificial Sequence
  synthetic polypeptide
RASQSVRSSYLA

SEQ ID NO: 2317 - protein, 7 aa, Artificial Sequence
  synthetic polypeptide
GASSRAT

SEQ ID NO: 2318 - protein, 9 aa, Artificial Sequence
  synthetic polypeptide
QQYGSSPFT

SEQ ID NO: 2319 - protein, 12 aa, Artificial Sequence
  synthetic polypeptide
RASQSVRGNYLA

SEQ ID NO: 2320 - protein, 7 aa, Artificial Sequence
  synthetic polypeptide
GASSRAT

SEQ ID NO: 2321 - protein, 9 aa, Artificial Sequence
  synthetic polypeptide
QQYGYSPFT

SEQ ID NO: 2322 - protein, 12 aa, Artificial Sequence
  synthetic polypeptide
RASQSIRSNYLA

SEQ ID NO: 2323 - protein, 7 aa, Artificial Sequence
  synthetic polypeptide
GASSRAT

SEQ ID NO: 2324 - protein, 9 aa, Artificial Sequence
  synthetic polypeptide
QQYGSSPFT

SEQ ID NO: 2325 - protein, 12 aa, Artificial Sequence
  synthetic polypeptide
RASQSVRSNYLA

SEQ ID NO: 2326 - protein, 7 aa, Artificial Sequence
  synthetic polypeptide
GASNRAT

SEQ ID NO: 2327 - protein, 9 aa, Artificial Sequence
  synthetic polypeptide
QQYGISPPT

SEQ ID NO: 2328 - protein, 11 aa, Artificial Sequence
  synthetic polypeptide
RASQSVSSNLA

SEQ ID NO: 2329 - protein, 7 aa, Artificial Sequence
  synthetic polypeptide
GSSSRAT

SEQ ID NO: 2330 - protein, 9 aa, Artificial Sequence
  synthetic polypeptide
QQYGSSPPP

SEQ ID NO: 2331 - protein, 12 aa, Artificial Sequence
  synthetic polypeptide
RASQGVRSDYLA

SEQ ID NO: 2332 - protein, 7 aa, Artificial Sequence
  synthetic polypeptide
GASSRAT

SEQ ID NO: 2333 - protein, 9 aa, Artificial Sequence
  synthetic polypeptide
QQYGSTPPT

SEQ ID NO: 2334 - protein, 12 aa, Artificial Sequence
  synthetic polypeptide
RASQGVRSSYFA

SEQ ID NO: 2335 - protein, 7 aa, Artificial Sequence
  synthetic polypeptide
GASTRAT

SEQ ID NO: 2336 - protein, 9 aa, Artificial Sequence
  synthetic polypeptide
QQYGSSPPT

SEQ ID NO: 2337 - protein, 12 aa, Artificial Sequence
  synthetic polypeptide
RASQSIRSNYLA

SEQ ID NO: 2338 - protein, 7 aa, Artificial Sequence
  synthetic polypeptide
GASSRAT

SEQ ID NO: 2339 - protein, 9 aa, Artificial Sequence
  synthetic polypeptide
QQYGSSPPS

SEQ ID NO: 2340 - protein, 12 aa, Artificial Sequence
  synthetic polypeptide
RASQSVRSSYLA

SEQ ID NO: 2341 - protein, 7 aa, Artificial Sequence
  synthetic polypeptide
GASSRAT

SEQ ID NO: 2342 - protein, 9 aa, Artificial Sequence
  synthetic polypeptide
QQYGDLPFT

SEQ ID NO: 2343 - protein, 12 aa, Artificial Sequence
  synthetic polypeptide
RASQSVRSSYLA

SEQ ID NO: 2344 - protein, 7 aa, Artificial Sequence
  synthetic polypeptide
GASSRAT

SEQ ID NO: 2345 - protein, 9 aa, Artificial Sequence
  synthetic polypeptide
QQYGDLPFT

SEQ ID NO: 2346 - protein, 12 aa, Artificial Sequence
  synthetic polypeptide
RASQGVRSSYLA

SEQ ID NO: 2347 - protein, 7 aa, Artificial Sequence
  synthetic polypeptide
GASSRAT

SEQ ID NO: 2348 - protein, 9 aa, Artificial Sequence
  synthetic polypeptide
QQYGSSPPT

SEQ ID NO: 2349 - protein, 12 aa, Artificial Sequence
  synthetic polypeptide
RASQSVRSNYLA

SEQ ID NO: 2350 - protein, 7 aa, Artificial Sequence
  synthetic polypeptide
GASSRAT

SEQ ID NO: 2351 - protein, 9 aa, Artificial Sequence
  synthetic polypeptide
QQYGSSPPT

SEQ ID NO: 2352 - protein, 11 aa, Artificial Sequence
  synthetic polypeptide
RASQGISNYLA

SEQ ID NO: 2353 - protein, 7 aa, Artificial Sequence
  synthetic polypeptide
AASILQS

SEQ ID NO: 2354 - protein, 9 aa, Artificial Sequence
  synthetic polypeptide
QQYFAYPIT

SEQ ID NO: 2355 - protein, 12 aa, Artificial Sequence
  synthetic polypeptide
RASQSVRSSYLA

SEQ ID NO: 2356 - protein, 7 aa, Artificial Sequence
  synthetic polypeptide
GASSRAT

SEQ ID NO: 2357 - protein, 9 aa, Artificial Sequence
  synthetic polypeptide
QQYGSSPPT

SEQ ID NO: 2358 - protein, 12 aa, Artificial Sequence
  synthetic polypeptide
RASQSVRSSYVA

SEQ ID NO: 2359 - protein, 7 aa, Artificial Sequence
  synthetic polypeptide
GASSRAT

SEQ ID NO: 2360 - protein, 9 aa, Artificial Sequence
  synthetic polypeptide
QQYGDLPFT

SEQ ID NO: 2361 - protein, 11 aa, Artificial Sequence
  synthetic polypeptide
RASQSISSYLN

SEQ ID NO: 2362 - protein, 7 aa, Artificial Sequence
  synthetic polypeptide
AASNLQS

SEQ ID NO: 2363 - protein, 9 aa, Artificial Sequence
  synthetic polypeptide
QQSFSSPRT

SEQ ID NO: 2364 - protein, 11 aa, Artificial Sequence
  synthetic polypeptide
RASQGISNYLA

SEQ ID NO: 2365 - protein, 7 aa, Artificial Sequence
  synthetic polypeptide
AASTLQS

SEQ ID NO: 2366 - protein, 9 aa, Artificial Sequence
  synthetic polypeptide
QQYYSTPLT

SEQ ID NO: 2367 - protein, 12 aa, Artificial Sequence
  synthetic polypeptide
RASQSVRSSYLA

SEQ ID NO: 2368 - protein, 7 aa, Artificial Sequence
  synthetic polypeptide
GASSRAT

SEQ ID NO: 2369 - protein, 9 aa, Artificial Sequence
  synthetic polypeptide
QQYGDLPFT

SEQ ID NO: 2370 - protein, 11 aa, Artificial Sequence
  synthetic polypeptide
RASQSISSYLN

SEQ ID NO: 2371 - protein, 7 aa, Artificial Sequence
  synthetic polypeptide
AASSLQS

SEQ ID NO: 2372 - protein, 9 aa, Artificial Sequence
  synthetic polypeptide
QQSYSTPFT

SEQ ID NO: 2373 - protein, 12 aa, Artificial Sequence
  synthetic polypeptide
RASQSLRRIYLA

SEQ ID NO: 2374 - protein, 7 aa, Artificial Sequence
  synthetic polypeptide
DVFDRAT

SEQ ID NO: 2375 - protein, 9 aa, Artificial Sequence
  synthetic polypeptide
QQYSESPFT

SEQ ID NO: 2376 - protein, 13 aa, Artificial Sequence
  synthetic polypeptide
SGSSSNIGINYVY

SEQ ID NO: 2377 - protein, 7 aa, Artificial Sequence
  synthetic polypeptide
RSDQRPS

SEQ ID NO: 2378 - protein, 11 aa, Artificial Sequence
  synthetic polypeptide
AAFDESLSGVV

SEQ ID NO: 2379 - protein, 11 aa, Artificial Sequence
  synthetic polypeptide
RASQGINNYLA

SEQ ID NO: 2380 - protein, 7 aa, Artificial Sequence
  synthetic polypeptide
AVSILQS

SEQ ID NO: 2381 - protein, 9 aa, Artificial Sequence
  synthetic polypeptide
QQYNFYPFS

SEQ ID NO: 2382 - protein, 11 aa, Artificial Sequence
  synthetic polypeptide
RTSQYIGRYLN

SEQ ID NO: 2383 - protein, 7 aa, Artificial Sequence
  synthetic polypeptide
GASTLQQ

SEQ ID NO: 2384 - protein, 9 aa, Artificial Sequence
  synthetic polypeptide
QQTYSTPRT

SEQ ID NO: 2385 - protein, 14 aa, Artificial Sequence
  synthetic polypeptide
TGSSSNIGAGYDVN

SEQ ID NO: 2386 - protein, 7 aa, Artificial Sequence
  synthetic polypeptide
VNNNRPS

SEQ ID NO: 2387 - protein, 11 aa, Artificial Sequence
  synthetic polypeptide
QSYDTSLSASV

SEQ ID NO: 2388 - protein, 14 aa, Artificial Sequence
  synthetic polypeptide
TGSSSNIGAGYDVN

SEQ ID NO: 2389 - protein, 7 aa, Artificial Sequence
  synthetic polypeptide
VNNNRPS

SEQ ID NO: 2390 - protein, 11 aa, Artificial Sequence
  synthetic polypeptide
QSYETSLSASV

SEQ ID NO: 2391 - protein, 11 aa, Artificial Sequence
  synthetic polypeptide
RASQSVDRYFN

SEQ ID NO: 2392 - protein, 7 aa, Artificial Sequence
  synthetic polypeptide
AASSLQS

SEQ ID NO: 2393 - protein, 9 aa, Artificial Sequence
  synthetic polypeptide
QQSYSTPWT

SEQ ID NO: 2394 - protein, 11 aa, Artificial Sequence
  synthetic polypeptide
RASQFIGRYFN

SEQ ID NO: 2395 - protein, 7 aa, Artificial Sequence
  synthetic polypeptide
AESSLQS

SEQ ID NO: 2396 - protein, 9 aa, Artificial Sequence
  synthetic polypeptide
QQSYSTPWT

SEQ ID NO: 2397 - protein, 14 aa, Artificial Sequence
  synthetic polypeptide
GLSSGSVTTTNYPG

SEQ ID NO: 2398 - protein, 7 aa, Artificial Sequence
  synthetic polypeptide
STSSRHS

SEQ ID NO: 2399 - protein, 11 aa, Artificial Sequence
  synthetic polypeptide
ALEEIGSYTYM

SEQ ID NO: 2400 - protein, 14 aa, Artificial Sequence
  synthetic polypeptide
GLSSGSVTSSHYPG

SEQ ID NO: 2401 - protein, 7 aa, Artificial Sequence
  synthetic polypeptide
NTNSRHS

SEQ ID NO: 2402 - protein, 11 aa, Artificial Sequence
  synthetic polypeptide
ALLNIDDGSTM

SEQ ID NO: 2403 - protein, 14 aa, Artificial Sequence
  synthetic polypeptide
GLSSGSVTSSNYPG

SEQ ID NO: 2404 - protein, 7 aa, Artificial Sequence
  synthetic polypeptide
NTNNRHS

SEQ ID NO: 2405 - protein, 10 aa, Artificial Sequence
  synthetic polypeptide
NLHLGSYTPM

SEQ ID NO: 2406 - protein, 14 aa, Artificial Sequence
  synthetic polypeptide
GLTSGSVTSSNYPD

SEQ ID NO: 2407 - protein, 7 aa, Artificial Sequence
  synthetic polypeptide
NTNSRHS

SEQ ID NO: 2408 - protein, 12 aa, Artificial Sequence
  synthetic polypeptide
ALYWGYGTNVDV

SEQ ID NO: 2409 - protein, 14 aa, Artificial Sequence
  synthetic polypeptide
GLTSGSVTSSNYPD

SEQ ID NO: 2410 - protein, 7 aa, Artificial Sequence
  synthetic polypeptide
NTNSRHS

SEQ ID NO: 2411 - protein, 11 aa, Artificial Sequence
  synthetic polypeptide
NLYMGSGGSKV

SEQ ID NO: 2412 - protein, 14 aa, Artificial Sequence
  synthetic polypeptide
TLISGDNIGGYDIS

SEQ ID NO: 2413 - protein, 11 aa, Artificial Sequence
  synthetic polypeptide
YYSDSYKHQSS

SEQ ID NO: 2414 - protein, 12 aa, Artificial Sequence
  synthetic polypeptide
SAYKSGSYKAPV

SEQ ID NO: 2415 - protein, 14 aa, Artificial Sequence
  synthetic polypeptide
AGTSSDVGYGNYVS

SEQ ID NO: 2416 - protein, 7 aa, Artificial Sequence
  synthetic polypeptide
RVSTRAS

SEQ ID NO: 2417 - protein, 10 aa, Artificial Sequence
  synthetic polypeptide
ASYTTNNKPV

SEQ ID NO: 2418 - protein, 11 aa, Artificial Sequence
  synthetic polypeptide
QGGNARFSSFA

SEQ ID NO: 2419 - protein, 7 aa, Artificial Sequence
  synthetic polypeptide
YNTNRPS

SEQ ID NO: 2420 - protein, 9 aa, Artificial Sequence
  synthetic polypeptide
QSYESGNYV

SEQ ID NO: 2421 - protein, 14 aa, Artificial Sequence
  synthetic polypeptide
TLSSGNSVGNYDIS

SEQ ID NO: 2422 - protein, 11 aa, Artificial Sequence
  synthetic polypeptide
YYSDSYKNQGS

SEQ ID NO: 2423 - protein, 11 aa, Artificial Sequence
  synthetic polypeptide
SVSNSGTYKPV

SEQ ID NO: 2424 - protein, 11 aa, Artificial Sequence
  synthetic polypeptide
QGGRLGSSYAH

SEQ ID NO: 2425 - protein, 7 aa, Artificial Sequence
  synthetic polypeptide
GNNYRPS

SEQ ID NO: 2426 - protein, 10 aa, Artificial Sequence
  synthetic polypeptide
QSGSSNTNVM

SEQ ID NO: 2427 - protein, 14 aa, Artificial Sequence
  synthetic polypeptide
TLSSGNSVGNYDIS

SEQ ID NO: 2428 - protein, 11 aa, Artificial Sequence
  synthetic polypeptide
YYSDSVKHQGS

SEQ ID NO: 2429 - protein, 9 aa, Artificial Sequence
  synthetic polypeptide
SAYKSGSHV

SEQ ID NO: 2430 - protein, 14 aa, Artificial Sequence
  synthetic polypeptide
TLNSANSVGSYDIS

SEQ ID NO: 2431 - protein, 11 aa, Artificial Sequence
  synthetic polypeptide
YYSDSLSHQGS

SEQ ID NO: 2432 - protein, 9 aa, Artificial Sequence
  synthetic polypeptide
SAYNRGSHV

SEQ ID NO: 2433 - protein, 14 aa, Artificial Sequence
  synthetic polypeptide
GLTSGSVTSDNFPV

SEQ ID NO: 2434 - protein, 7 aa, Artificial Sequence
  synthetic polypeptide
TINSRHS

SEQ ID NO: 2435 - protein, 10 aa, Artificial Sequence
  synthetic polypeptide
ALYLENFANE

SEQ ID NO: 2436 - protein, 11 aa, Artificial Sequence
  synthetic polypeptide
RGDSLERYGTN

SEQ ID NO: 2437 - protein, 7 aa, Artificial Sequence
  synthetic polypeptide
DDDSRPS

SEQ ID NO: 2438 - protein, 10 aa, Artificial Sequence
  synthetic polypeptide
QSADSSGNAV

SEQ ID NO: 2439 - protein, 11 aa, Artificial Sequence
  synthetic polypeptide
RGDTLRNYHAN

SEQ ID NO: 2440 - protein, 7 aa, Artificial Sequence
  synthetic polypeptide
GDDIRPS

SEQ ID NO: 2441 - protein, 11 aa, Artificial Sequence
  synthetic polypeptide
QSSDSSGYRVV

SEQ ID NO: 2442 - protein, 7 aa, Artificial Sequence
  synthetic polypeptide
QGGYYTH

SEQ ID NO: 2443 - protein, 7 aa, Artificial Sequence
  synthetic polypeptide
INNNRPS

SEQ ID NO: 2444 - protein, 10 aa, Artificial Sequence
  synthetic polypeptide
QSGSSSTIPV

SEQ ID NO: 2445 - protein, 7 aa, Artificial Sequence
  synthetic polypeptide
QGGYYTH

SEQ ID NO: 2446 - protein, 7 aa, Artificial Sequence
  synthetic polypeptide
VNNNRPS

SEQ ID NO: 2447 - protein, 10 aa, Artificial Sequence
  synthetic polypeptide
QSGSSSTIPV

SEQ ID NO: 2448 - protein, 11 aa, Artificial Sequence
  synthetic polypeptide
QGGNLGLYGAN

SEQ ID NO: 2449 - protein, 7 aa, Artificial Sequence
  synthetic polypeptide
GDNYRPL

SEQ ID NO: 2450 - protein, 10 aa, Artificial Sequence
  synthetic polypeptide
QSADYSGNSV

SEQ ID NO: 2451 - protein, 11 aa, Artificial Sequence
  synthetic polypeptide
QGGNLWLYGAN

SEQ ID NO: 2452 - protein, 7 aa, Artificial Sequence
  synthetic polypeptide
GDNQRPL

SEQ ID NO: 2453 - protein, 10 aa, Artificial Sequence
  synthetic polypeptide
QSADYSGNSV

SEQ ID NO: 2454 - protein, 11 aa, Artificial Sequence
  synthetic polypeptide
QGGNLGLYGAN

SEQ ID NO: 2455 - protein, 7 aa, Artificial Sequence
  synthetic polypeptide
GDNYMPL

SEQ ID NO: 2456 - protein, 10 aa, Artificial Sequence
  synthetic polypeptide
QSADYSGNSV

SEQ ID NO: 2457 - protein, 14 aa, Artificial Sequence
  synthetic polypeptide
GLSSGSATSGNYPE

SEQ ID NO: 2458 - protein, 7 aa, Artificial Sequence
  synthetic polypeptide
NTASRHS

SEQ ID NO: 2459 - protein, 10 aa, Artificial Sequence
  synthetic polypeptide
QSSDYPGNSV

SEQ ID NO: 2460 - protein, 14 aa, Artificial Sequence
  synthetic polypeptide
GLSSGSVTSSNYPD

SEQ ID NO: 2461 - protein, 7 aa, Artificial Sequence
  synthetic polypeptide
NTNSRHS

SEQ ID NO: 2462 - protein, 12 aa, Artificial Sequence
  synthetic polypeptide
LLYMGGSDFNFV

SEQ ID NO: 2463 - protein, 14 aa, Artificial Sequence
  synthetic polypeptide
GLKSGSVTSSNYPA

SEQ ID NO: 2464 - protein, 7 aa, Artificial Sequence
  synthetic polypeptide
NTNSRHS

SEQ ID NO: 2465 - protein, 12 aa, Artificial Sequence
  synthetic polypeptide
ALYMGSGSANAM

SEQ ID NO: 2466 - protein, 14 aa, Artificial Sequence
  synthetic polypeptide
AGTSSDVGYGYYVS

SEQ ID NO: 2467 - protein, 7 aa, Artificial Sequence
  synthetic polypeptide
DVNKRAS

SEQ ID NO: 2468 - protein, 10 aa, Artificial Sequence
  synthetic polypeptide
ASYRSSANAV

SEQ ID NO: 2469 - protein, 14 aa, Artificial Sequence
  synthetic polypeptide
GLKSGSVTSTNFPT

SEQ ID NO: 2470 - protein, 7 aa, Artificial Sequence
  synthetic polypeptide
NTNTRHS

SEQ ID NO: 2471 - protein, 10 aa, Artificial Sequence
  synthetic polypeptide
ALFISNPSVE

SEQ ID NO: 2472 - protein, 14 aa, Artificial Sequence
  synthetic polypeptide
GLKSGSVTSDNFPT

SEQ ID NO: 2473 - protein, 7 aa, Artificial Sequence
  synthetic polypeptide
NTNTRHS

SEQ ID NO: 2474 - protein, 10 aa, Artificial Sequence
  synthetic polypeptide
ALFISNPSVE

SEQ ID NO: 2475 - protein, 14 aa, Artificial Sequence
  synthetic polypeptide
GLKSGSVTSDNFPT

SEQ ID NO: 2476 - protein, 7 aa, Artificial Sequence
  synthetic polypeptide
NTNTRHS

SEQ ID NO: 2477 - protein, 10 aa, Artificial Sequence
  synthetic polypeptide
ALFISNPSVE

SEQ ID NO: 2478 - protein, 14 aa, Artificial Sequence
  synthetic polypeptide
GLKSGSVTSTNFPT

SEQ ID NO: 2479 - protein, 7 aa, Artificial Sequence
  synthetic polypeptide
NTNSRHS

SEQ ID NO: 2480 - protein, 10 aa, Artificial Sequence
  synthetic polypeptide
ALFISNPSVE

SEQ ID NO: 2481 - protein, 14 aa, Artificial Sequence
  synthetic polypeptide
GLTSGSVTSTNFPT

SEQ ID NO: 2482 - protein, 7 aa, Artificial Sequence
  synthetic polypeptide
NTNSRHS

SEQ ID NO: 2483 - protein, 10 aa, Artificial Sequence
  synthetic polypeptide
ALFISNPSVE

SEQ ID NO: 2484 - protein, 14 aa, Artificial Sequence
  synthetic polypeptide
GLKSGSVTSDNFPT

SEQ ID NO: 2485 - protein, 7 aa, Artificial Sequence
  synthetic polypeptide
NTNSRHS

SEQ ID NO: 2486 - protein, 10 aa, Artificial Sequence
  synthetic polypeptide
ALFISNPSVE

SEQ ID NO: 2487 - protein, 14 aa, Artificial Sequence
  synthetic polypeptide
GLKSGSVTSDNFPT

SEQ ID NO: 2488 - protein, 7 aa, Artificial Sequence
  synthetic polypeptide
NTNSRHS

SEQ ID NO: 2489 - protein, 10 aa, Artificial Sequence
  synthetic polypeptide
ALFISNPSVE

SEQ ID NO: 2490 - protein, 14 aa, Artificial Sequence
  synthetic polypeptide
GLTSGSVTSDNFPT

SEQ ID NO: 2491 - protein, 7 aa, Artificial Sequence
  synthetic polypeptide
NTNSRHS

SEQ ID NO: 2492 - protein, 10 aa, Artificial Sequence
  synthetic polypeptide
ALFISNPSVE

SEQ ID NO: 2493 - protein, 14 aa, Artificial Sequence
  synthetic polypeptide
GLKSGSVTSDNFPT

SEQ ID NO: 2494 - protein, 7 aa, Artificial Sequence
  synthetic polypeptide
NTNTRHS

SEQ ID NO: 2495 - protein, 10 aa, Artificial Sequence
  synthetic polypeptide
ALFISNPSVE

SEQ ID NO: 2496 - protein, 14 aa, Artificial Sequence
  synthetic polypeptide
GVTSGSVTSDNFPT

SEQ ID NO: 2497 - protein, 7 aa, Artificial Sequence
  synthetic polypeptide
NTNTRHS

SEQ ID NO: 2498 - protein, 10 aa, Artificial Sequence
  synthetic polypeptide
ALFISNPSVE

SEQ ID NO: 2499 - protein, 14 aa, Artificial Sequence
  synthetic polypeptide
GLTSGSVTSTNFPT

SEQ ID NO: 2500 - protein, 7 aa, Artificial Sequence
  synthetic polypeptide
NTNTRHS

SEQ ID NO: 2501 - protein, 10 aa, Artificial Sequence
  synthetic polypeptide
ALFISNPSVE

SEQ ID NO: 2502 - protein, 14 aa, Artificial Sequence
  synthetic polypeptide
GLKSGSVTSDNFPT

SEQ ID NO: 2503 - protein, 7 aa, Artificial Sequence
  synthetic polypeptide
NTNSRHS

SEQ ID NO: 2504 - protein, 10 aa, Artificial Sequence
  synthetic polypeptide
ALFISNPSVE

SEQ ID NO: 2505 - protein, 14 aa, Artificial Sequence
  synthetic polypeptide
GLKSGSVTSDNFPT

SEQ ID NO: 2506 - protein, 7 aa, Artificial Sequence
  synthetic polypeptide
NTNTRHS

SEQ ID NO: 2507 - protein, 10 aa, Artificial Sequence
  synthetic polypeptide
ALFISNPSVE

SEQ ID NO: 2508 - protein, 14 aa, Artificial Sequence
  synthetic polypeptide
GLTSGSVTSTNFPT

SEQ ID NO: 2509 - protein, 7 aa, Artificial Sequence
  synthetic polypeptide
NTNSRHS

SEQ ID NO: 2510 - protein, 10 aa, Artificial Sequence
  synthetic polypeptide
ALFISNPSVE

SEQ ID NO: 2511 - protein, 22 aa, Artificial Sequence
  synthetic polypeptide
QAVVTQEPSLTVSPGGTVTLTC

SEQ ID NO: 2512 - protein, 7 aa, Artificial Sequence
  synthetic polypeptide
NTNSRHS

SEQ ID NO: 2513 - protein, 10 aa, Artificial Sequence
  synthetic polypeptide
ALFISNPSVE

SEQ ID NO: 2514 - protein, 14 aa, Artificial Sequence
  synthetic polypeptide
GLKSGSVTSDNFPT

SEQ ID NO: 2515 - protein, 7 aa, Artificial Sequence
  synthetic polypeptide
NTNTRHS

SEQ ID NO: 2516 - protein, 10 aa, Artificial Sequence
  synthetic polypeptide
ALFISNPSVE

SEQ ID NO: 2517 - protein, 14 aa, Artificial Sequence
  synthetic polypeptide
GLKSGSVTSDNFPT

SEQ ID NO: 2518 - protein, 7 aa, Artificial Sequence
  synthetic polypeptide
NTNTRHS

SEQ ID NO: 2519 - protein, 10 aa, Artificial Sequence
  synthetic polypeptide
ALFISNPSVE

SEQ ID NO: 2520 - protein, 14 aa, Artificial Sequence
  synthetic polypeptide
GLKSGSVTSDNFPT

SEQ ID NO: 2521 - protein, 7 aa, Artificial Sequence
  synthetic polypeptide
NTNTRHS

SEQ ID NO: 2522 - protein, 10 aa, Artificial Sequence
  synthetic polypeptide
ALFISNPSVE

SEQ ID NO: 2523 - protein, 14 aa, Artificial Sequence
  synthetic polypeptide
GLKSGSVTSDNFPT

SEQ ID NO: 2524 - protein, 7 aa, Artificial Sequence
  synthetic polypeptide
NTNTRHS

SEQ ID NO: 2525 - protein, 10 aa, Artificial Sequence
  synthetic polypeptide
ALFISNPSVE

SEQ ID NO: 2526 - protein, 14 aa, Artificial Sequence
  synthetic polypeptide
GLKSGSVTSDNFPT

SEQ ID NO: 2527 - protein, 7 aa, Artificial Sequence
  synthetic polypeptide
NTNTRHS

SEQ ID NO: 2528 - protein, 10 aa, Artificial Sequence
  synthetic polypeptide
ALFISNPSVE

SEQ ID NO: 2529 - protein, 14 aa, Artificial Sequence
  synthetic polypeptide
GLKSGSVTSDNFPT

SEQ ID NO: 2530 - protein, 7 aa, Artificial Sequence
  synthetic polypeptide
NTNTRHS

SEQ ID NO: 2531 - protein, 10 aa, Artificial Sequence
  synthetic polypeptide
ALFISNPSVE

SEQ ID NO: 2532 - protein, 14 aa, Artificial Sequence
  synthetic polypeptide
GLKSGSVTSDNFPT

SEQ ID NO: 2533 - protein, 7 aa, Artificial Sequence
  synthetic polypeptide
NTNTRHS

SEQ ID NO: 2534 - protein, 10 aa, Artificial Sequence
  synthetic polypeptide
ALFISNPSVE

SEQ ID NO: 2535 - protein, 15 aa, Artificial Sequence
  synthetic polypeptide
RASKSVSTSGYSFMH

SEQ ID NO: 2536 - protein, 7 aa, Artificial Sequence
  synthetic polypeptide
LASNLES

SEQ ID NO: 2537 - protein, 9 aa, Artificial Sequence
  synthetic polypeptide
QHSREVPWT

SEQ ID NO: 2538 - protein, 11 aa, Artificial Sequence
  synthetic polypeptide
SKSVSTSGYSF

SEQ ID NO: 2539 - protein, 3 aa, Artificial Sequence
  synthetic polypeptide
LAS

SEQ ID NO: 2540 - protein, 6 aa, Artificial Sequence
  synthetic polypeptide
SREVPW

SEQ ID NO: 2541 - protein, 15 aa, Artificial Sequence
  synthetic polypeptide
RASKSVSTSGYSFMH

SEQ ID NO: 2542 - protein, 7 aa, Artificial Sequence
  synthetic polypeptide
LASNLES

SEQ ID NO: 2543 - protein, 9 aa, Artificial Sequence
  synthetic polypeptide
QHSREVPWT

SEQ ID NO: 2544 - protein, 21 aa, Homo sapiens
MEFGLSWLFLVAILKGVQCSR

SEQ ID NO: 2545 - protein, 55 aa, Homo sapiens
FVPVFLPAKPTTTPAPRPPTPAPTIASQPLSLRPEACRPAAGGAVHTRGLDFACD

SEQ ID NO: 2546 - protein, 232 aa, Homo sapiens; identical to SEQ ID NO: 620

SEQ ID NO: 2547 - protein, 39 aa, Homo sapiens
IEVMYPPPYLDNEKSNGTIIHVKGKHLCPSPLFPGPSKP

SEQ ID NO: 2548 - protein, 28 aa, Homo sapiens
IYIWAPLAGTCGVLLLSLVITLYCNHRN

SEQ ID NO: 2549 - protein, 30 aa, Homo sapiens
PFFFCCFIAVAMGIRFIIMVAIWSAVFLNS

SEQ ID NO: 2550 - protein, 20 aa, Homo sapiens
ILVIFSGMFLVFTLAGALFL

SEQ ID NO: 2551 - protein, 21 aa, Homo sapiens
ILVIFSGMFLVFTLAGALFLH

SEQ ID NO: 2552 - protein, 21 aa, Homo sapiens
GVLAGIVMGDLVLTVLIALAV

SEQ ID NO: 2553 - protein, 21 aa, Homo sapiens
LLAGLVAADAVASLLIVGAVF

SEQ ID NO: 2554 - protein, 43 aa, Homo sapiens
RKRGRKKLLYIFKQPFMRPVQTTQEEDGCSCRFPEEEEGGCEL

SEQ ID NO: 2555 - protein, 23 aa, Homo sapiens
CARPRRSPAQEDGKVYINMPGRG

SEQ ID NO: 2556 - protein, 42 aa, Homo sapiens
ALYLLRRDQRLPPDAHKPPGGGSFRTPIQEEQADAHSTLAKI

SEQ ID NO: 2557 - protein, 49 aa, Homo sapiens
HQRRKYRSNKGESPVEPAEPCHYSCPREEEGSTIPIQEDYRKPEPACSP

SEQ ID NO: 2558 - protein, 48 aa, Homo sapiens; identical to SEQ ID NO: 10

SEQ ID NO: 2559 - protein, 112 aa, Homo sapiens
RVKFSRSADAPAYQQGQNQLYNELNLGRREEYDVLDKRRGRDPEMGGKPRRKNPQEGLYNELQKDKMAEAYSEIGMKGERRRGKGHDGLYQGLSTATKDTYDALHMQALPPR

SEQ ID NO: 2560 - protein, 42 aa, Homo sapiens
RLKIQVRKAAITSYEKSDGVYTGLSTRNQETYETLKHEKPPQ

SEQ ID NO: 2561 - protein, 366 aa, Homo sapiens
MARPHPWWLCVLGTLVGLSATPAPKSCPERHYWAQGKLCCQMCEPGTFLVKDCDQHRKAAQCDPCIPGVSFSPDHHTRPHCESCRHCNSGLLVRNCTITANAECACRNGWQCRDKECTECDPLPNPSLTARSSQALSPHPQPTHLPYVSEMLEARTAGHMQTLADFRQLPARTLSTHWPPQRSLCSSDFIRILVIFSGMFLVFTLAGALFLRKRGRKKLLYIFKQPFMRPVQTTQEEDGCSCRFPEEEEGGCELRVKFSRSADAPAYQQGQNQLYNELNLGRREEYDVLDKRRGRDPEMGGKPRRKNPQEGLYNELQKDKMAEAYSEIGMKGERRRGKGHDGLYQGLSTATKDTYDALHMQALPPR

SEQ ID NO: 2562 - protein, 429 aa, Artificial Sequence
  synthetic polypeptide
MARPHPWWLCVLGTLVGLSATPAPKSCPERHYWAQGKLCCQMCEPGTFLVKDCDQHRKAAQCDPCIPGVSFSPDHHTRPHCESCRHCNSGLLVRNCTITANAECACRNGWQCRDKECTECDPLPNPSLTARSSQALSPHPQPTHLPYVSEMLEARTAGHMQTLADFRQLPARTLSTHWPPQRSLCSSDFIRFVPVFLPAKPTTTPAPRPPTPAPTIASQPLSLRPEACRPAAGGAVHTRGLDFACDIYIWAPLAGTCGVLLLSLVITLYCNHRNRKRGRKKLLYIFKQPFMRPVQTTQEEDGCSCRFPEEEEGGCELRVKFSRSADAPAYQQGQNQLYNELNLGRREEYDVLDKRRGRDPEMGGKPRRKNPQEGLYNELQKDKMAEAYSEIGMKGERRRGKGHDGLYQGLSTATKDTYDALHMQALPPR

SEQ ID NO: 2563 - protein, 364 aa, Artificial Sequence
  synthetic polypeptide
MARPHPWWLCVLGTLVGLSATPAPKSCPERHYWAQGKLCCQMCEPGTFLVKDCDQHRKAAQCDPCIPGVSFSPDHHTRPHCESCRHCNSGLLVRNCTITANAECACRNGWQCRDKECTECDPLPNPSLTARSSQALSPHPQPTHLPYVSEMLEARTAGHMQTLADFRQLPARTLSTHWPPQRSLCSSDFIRILVIFSGMFLVFTLAGALFLRSKRSRLLHSDYMNMTPRRPGPTRKHYQPYAPPRDFAAYRSRVKFSRSADAPAYQQGQNQLYNELNLGRREEYDVLDKRRGRDPEMGGKPRRKNPQEGLYNELQKDKMAEAYSEIGMKGERRRGKGHDGLYQGLSTATKDTYDALHMQALPPR

SEQ ID NO: 2564 - protein, 427 aa, Artificial Sequence
  synthetic polypeptide
MARPHPWWLCVLGTLVGLSATPAPKSCPERHYWAQGKLCCQMCEPGTFLVKDCDQHRKAAQCDPCIPGVSFSPDHHTRPHCESCRHCNSGLLVRNCTITANAECACRNGWQCRDKECTECDPLPNPSLTARSSQALSPHPQPTHLPYVSEMLEARTAGHMQTLADFRQLPARTLSTHWPPQRSLCSSDFIRFVPVFLPAKPTTTPAPRPPTPAPTIASQPLSLRPEACRPAAGGAVHTRGLDFACDIYIWAPLAGTCGVLLLSLVITLYCNHRNRSKRSRLLHSDYMNMTPRRPGPTRKHYQPYAPPRDFAAYRSRVKFSRSADAPAYQQGQNQLYNELNLGRREEYDVLDKRRGRDPEMGGKPRRKNPQEGLYNELQKDKMAEAYSEIGMKGERRRGKGHDGLYQGLSTATKDTYDALHMQALPPR

SEQ ID NO: 2565 - protein, 504 aa, Artificial Sequence
  synthetic polypeptide
MALPVTALLLPLALLLHAARPQVQLVQSGAEVKKPGASVKVSCKASGYTFTNYGMNWVRQAPGQGLKWMGWINTYTGEPTYADAFKGRVTMTRDTSISTAYMELSRLRSDDTAVYYCARDYGDYGMDYWGQGTTVTVSSGGGGSGGGGSGGGGSGDIVMTQSPDSLAVSLGERATINCRASKSVSTSGYSFMHWYQQKPGQPPKLLIYLASNLESGVPDRFSGSGSGTDFTLTISSLQAEDVAVYYCQHSREVPWTFGQGTKVEIKFVPVFLPAKPTTTPAPRPPTPAPTIASQPLSLRPEACRPAAGGAVHTRGLDFACDIYIWAPLAGTCGVLLLSLVITLYCNHRNRKRGRKKLLYIFKQPFMRPVQTTQEEDGCSCRFPEEEEGGCELRVKFSRSADAPAYQQGQNQLYNELNLGRREEYDVLDKRRGRDPEMGGKPRRKNPQEGLYNELQKDKMAEAYSEIGMKGERRRGKGHDGLYQGLSTATKDTYDALHMQALPPR

SEQ ID NO: 2566 - protein, 678 aa, Artificial Sequence
  synthetic polypeptide
MALPVTALLLPLALLLHAARPQVQLVQSGAEVKKPGASVKVSCKASGYTFTNYGMNWVRQAPGQGLKWMGWINTYTGEPTYADAFKGRVTMTRDTSISTAYMELSRLRSDDTAVYYCARDYGDYGMDYWGQGTTVTVSSGGGGSGGGGSGGGGSGDIVMTQSPDSLAVSLGERATINCRASKSVSTSGYSFMHWYQQKPGQPPKLLIYLASNLESGVPDRFSGSGSGTDFTLTISSLQAEDVAVYYCQHSREVPWTFGQGTKVEIKEPKSCDKTHTCPPCPAPELLGGPSVFLFPPKPKDTLMISRTPEVTCVVVDVSHEDPEVKFNWYVDGVEVHNAKTKPREEQYNSTYRVVSVLTVLHQDWLNGKEYKCKVSNKALPAPIEKTISKAKGQPREPQVYTLPPSRDELTKNQVSLTCLVKGFYPSDIAVEWESNGQPENNYKTTPPVLDSDGSFFLYSKLTVDKSRWQQGNVFSCSVMHEALHNHYTQKSLSLSPGKFWVLVVVGGVLACYSLLVTVAFIIFWVRSKRSRLLHSDYMNMTPRRPGPTRKHYQPYAPPRDFAAYRSRVKFSRSADAPAYQQGQNQLYNELNLGRREEYDVLDKRRGRDPEMGGKPRRKNPQEGLYNELQKDKMAEAYSEIGMKGERRRGKGHDGLYQGLSTATKDTYDALHMQALPPR

SEQ ID NO: 2567 - protein, 485 aa, Artificial Sequence
  synthetic polypeptide
MALPVTALLLPLALLLHAARPQVQLVQSGAEVKKPGASVKVSCKASGYTFTNYGMNWVRQAPGQGLKWMGWINTYTGEPTYADAFKGRVTMTRDTSISTAYMELSRLRSDDTAVYYCARDYGDYGMDYWGQGTTVTVSSGGGGSGGGGSGGGGSGDIVMTQSPDSLAVSLGERATINCRASKSVSTSGYSFMHWYQQKPGQPPKLLIYLASNLESGVPDRFSGSGSGTDFTLTISSLQAEDVAVYYCQHSREVPWTFGQGTKVEIKIEVMYPPPYLDNEKSNGTIIHVKGKHLCPSPLFPGPSKPFWVLVVVGGVLACYSLLVTVAFIIFWVRSKRSRLLHSDYMNMTPRRPGPTRKHYQPYAPPRDFAAYRSRVKFSRSADAPAYQQGQNQLYNELNLGRREEYDVLDKRRGRDPEMGGKPRRKNPQEGLYNELQKDKMAEAYSEIGMKGERRRGKGHDGLYQGLSTATKDTYDALHMQALPPR

SEQ ID NO: 2568 - protein, 502 aa, Artificial Sequence
  synthetic polypeptide
MALPVTALLLPLALLLHAARPQVQLVQSGAEVKKPGASVKVSCKASGYTFTNYGMNWVRQAPGQGLKWMGWINTYTGEPTYADAFKGRVTMTRDTSISTAYMELSRLRSDDTAVYYCARDYGDYGMDYWGQGTTVTVSSGGGGSGGGGSGGGGSGDIVMTQSPDSLAVSLGERATINCRASKSVSTSGYSFMHWYQQKPGQPPKLLIYLASNLESGVPDRFSGSGSGTDFTLTISSLQAEDVAVYYCQHSREVPWTFGQGTKVEIKFVPVFLPAKPTTTPAPRPPTPAPTIASQPLSLRPEACRPAAGGAVHTRGLDFACDIYIWAPLAGTCGVLLLSLVITLYCNHRNRSKRSRLLHSDYMNMTPRRPGPTRKHYQPYAPPRDFAAYRSRVKFSRSADAPAYQQGQNQLYNELNLGRREEYDVLDKRRGRDPEMGGKPRRKNPQEGLYNELQKDKMAEAYSEIGMKGERRRGKGHDGLYQGLSTATKDTYDALHMQALPPR

SEQ ID NO: 2569 - protein, 312 aa, Artificial Sequence
  synthetic polypeptide
MARPHPWWLCVLGTLVGLSATPAPKSCPERHYWAQGKLCCQMCEPGTFLVKDCDQHRKAAQCDPCIPGVSFSPDHHTRPHCESCRHCNSGLLVRNCTITANAECACRNGWQCRDKECTECDPLPNPSLTARSSQALSPHPQPTHLPYVSEMLEARTAGHMQTLADFRQLPARTLSTHWPPQRSLCSSDFIRILVIFSGMFLVFTLAGALFLHQRRKYRSNKGESPVEPAEPCHYSCPREEEGSTIPIQEDYRKPEPACSPYFLGRLVPRGRGAAEAATRKQRITETESPYQELQGQRSDVYSDLNTQRPYYK

SEQ ID NO: 2570 - protein, 302 aa, Artificial Sequence
  synthetic polypeptide
MARPHPWWLCVLGTLVGLSATPAPKSCPERHYWAQGKLCCQMCEPGTFLVKDCDQHRKAAQCDPCIPGVSFSPDHHTRPHCESCRHCNSGLLVRNCTITANAECACRNGWQCRDKECTECDPLPNPSLTARSSQALSPHPQPTHLPYVSEMLEARTAGHMQTLADFRQLPARTLSTHWPPQRSLCSSDFIRILVIFSGMFLVFTLAGALFLHQRRKYRSNKGESPVEPAEPCHYSCPREEEGSTIPIQEDYRKPEPACSPRLKIQVRKAAITSYEKSDGVYTGLSTRNQETYETLKHEKPPQ

SEQ ID NO: 2571 - protein, 348 aa, Artificial Sequence
  synthetic polypeptide
MARPHPWWLCVLGTLVGLSATPAPKSCPERHYWAQGKLCCQMCEPGTFLVKDCDQHRKAAQCDPCIPGVSFSPDHHTRPHCESCRHCNSGLLVRNCTITANAECACRNGWQCRDKECTECDPLPNPSLTARSSQALSPHPQPTHLPYVSEMLEARTAGHMQTLADFRQLPARTLSTHWPPQRSLCSSDFIRLLAGLVAADAVASLLIVGAVFLCARPRRSPAQEDGKVYINMPGRGRVKFSRSADAPAYQQGQNQLYNELNLGRREEYDVLDKRRGRDPEMGGKPRRKNPQEGLYNELQKDKMAEAYSEIGMKGERRRGKGHDGLYQGLSTATKDTYDALHMQALPPR

SEQ ID NO: 2572 - protein, 376 aa, Artificial Sequence
  synthetic polypeptide
MARPHPWWLCVLGTLVGLSATPAPKSCPERHYWAQGKLCCQMCEPGTFLVKDCDQHRKAAQCDPCIPGVSFSPDHHTRPHCESCRHCNSGLLVRNCTITANAECACRNGWQCRDKECTECDPLPNPSLTARSSQALSPHPQPTHLPYVSEMLEARTAGHMQTLADFRQLPARTLSTHWPPQRSLCSSDFIRGVLAGIVMGDLVLTVLIALAVYFLGRLVPRGRGAAEAATRKQRITETESPYQELQGQRSDVYSDLNTQRPYYKRVKFSRSADAPAYQQGQNQLYNELNLGRREEYDVLDKRRGRDPEMGGKPRRKNPQEGLYNELQKDKMAEAYSEIGMKGERRRGKGHDGLYQGLSTATKDTYDALHMQALPPR

SEQ ID NO: 2573 - protein, 264 aa, Artificial Sequence
  synthetic polypeptide
MARPHPWWLCVLGTLVGLSATPAPKSCPERHYWAQGKLCCQMCEPGTFLVKDCDQHRKAAQCDPCIPGVSFSPDHHTRPHCESCRHCNSGLLVRNCTITANAECACRNGWQCRDKECTECDPLPNPSLTARSSQALSPHPQPTHLPYVSEMLEARTAGHMQTLADFRQLPARTLSTHWPPQRSLCSSDFIRGVLAGIVMGDLVLTVLIALAVYFLGRLVPRGRGAAEAATRKQRITETESPYQELQGQRSDVYSDLNTQRPYYK

SEQ ID NO: 2574 - protein, 566 aa, Artificial Sequence
  synthetic polypeptide
MALPVTALLLPLALLLHAARPQVQLVQSGAEVKKPGASVKVSCKASGYTFTNYGMNWVRQAPGQGLKWMGWINTYTGEPTYADAFKGRVTMTRDTSISTAYMELSRLRSDDTAVYYCARDYGDYGMDYWGQGTTVTVSSGGGGSGGGGSGGGGSGDIVMTQSPDSLAVSLGERATINCRASKSVSTSGYSFMHWYQQKPGQPPKLLIYLASNLESGVPDRFSGSGSGTDFTLTISSLQAEDVAVYYCQHSREVPWTFGQGTKVEIKEPKSCDKTHTCPPCPAPELLGGPSVFLFPPKPKDTLMISRTPEVTCVVVDVSHEDPEVKFNWYVDGVEVHNAKTKPREEQYNSTYRVVSVLTVLHQDWLNGKEYKCKVSNKALPAPIEKTISKAKGQPREPQVYTLPPSRDELTKNQVSLTCLVKGFYPSDIAVEWESNGQPENNYKTTPPVLDSDGSFFLYSKLTVDKSRWQQGNVFSCSVMHEALHNHYTQKSLSLSPGKFWVLVVVGGVLACYSLLVTVAFIIFWVRSKRSRLLHSDYMNMTPRRPGPTRKHYQPYAPPRDFAAYRS

SEQ ID NO: 2575 - protein, 392 aa, Artificial Sequence
  synthetic polypeptide
MALPVTALLLPLALLLHAARPQVQLVQSGAEVKKPGASVKVSCKASGYTFTNYGMNWVRQAPGQGLKWMGWINTYTGEPTYADAFKGRVTMTRDTSISTAYMELSRLRSDDTAVYYCARDYGDYGMDYWGQGTTVTVSSGGGGSGGGGSGGGGSGDIVMTQSPDSLAVSLGERATINCRASKSVSTSGYSFMHWYQQKPGQPPKLLIYLASNLESGVPDRFSGSGSGTDFTLTISSLQAEDVAVYYCQHSREVPWTFGQGTKVEIKFVPVFLPAKPTTTPAPRPPTPAPTIASQPLSLRPEACRPAAGGAVHTRGLDFACDIYIWAPLAGTCGVLLLSLVITLYCNHRNRKRGRKKLLYIFKQPFMRPVQTTQEEDGCSCRFPEEEEGGCEL

SEQ ID NO: 2576 - protein, 461 aa, Artificial Sequence
  synthetic polypeptide
MALPVTALLLPLALLLHAARPQVQLVQSGAEVKKPGASVKVSCKASGYTFTNYGMNWVRQAPGQGLKWMGWINTYTGEPTYADAFKGRVTMTRDTSISTAYMELSRLRSDDTAVYYCARDYGDYGMDYWGQGTTVTVSSGGGGSGGGGSGGGGSGDIVMTQSPDSLAVSLGERATINCRASKSVSTSGYSFMHWYQQKPGQPPKLLIYLASNLESGVPDRFSGSGSGTDFTLTISSLQAEDVAVYYCQHSREVPWTFGQGTKVEIKFVPVFLPAKPTTTPAPRPPTPAPTIASQPLSLRPEACRPAAGGAVHTRGLDFACDIYIWAPLAGTCGVLLLSLVITLYCNHRNRVKFSRSADAPAYQQGQNQLYNELNLGRREEYDVLDKRRGRDPEMGGKPRRKNPQEGLYNELQKDKMAEAYSEIGMKGERRRGKGHDGLYQGLSTATKDTYDALHMQALPPR

SEQ ID NO: 2577 - protein, 435 aa, Artificial Sequence
  synthetic polypeptide
MALPVTALLLPLALLLHAARPQVQLVQSGAEVKKPGASVKVSCKASGYTFTNYGMNWVRQAPGQGLKWMGWINTYTGEPTYADAFKGRVTMTRDTSISTAYMELSRLRSDDTAVYYCARDYGDYGMDYWGQGTTVTVSSGGGGSGGGGSGGGGSGDIVMTQSPDSLAVSLGERATINCRASKSVSTSGYSFMHWYQQKPGQPPKLLIYLASNLESGVPDRFSGSGSGTDFTLTISSLQAEDVAVYYCQHSREVPWTFGQGTKVEIKFVPVFLPAKPTTTPAPRPPTPAPTIASQPLSLRPEACRPAAGGAVHTRGLDFACDIYIWAPLAGTCGVLLLSLVITLYCNHRNRKRGRKKLLYIFKQPFMRPVQTTQEEDGCSCRFPEEEEGGCELRKRGRKKLLYIFKQPFMRPVQTTQEEDGCSCRFPEEEEGGCEL

SEQ ID NO: 2578 - protein, 581 aa, Artificial Sequence
  synthetic polypeptide
MALPVTALLLPLALLLHAARPQVQLVQSGAEVKKPGASVKVSCKASGYTFTNYGMNWVRQAPGQGLKWMGWINTYTGEPTYADAFKGRVTMTRDTSISTAYMELSRLRSDDTAVYYCARDYGDYGMDYWGQGTTVTVSSGGGGSGGGGSGGGGSGDIVMTQSPDSLAVSLGERATINCRASKSVSTSGYSFMHWYQQKPGQPPKLLIYLASNLESGVPDRFSGSGSGTDFTLTISSLQAEDVAVYYCQHSREVPWTFGQGTKVEIKFVPVFLPAKPTTTPAPRPPTPAPTIASQPLSLRPEACRPAAGGAVHTRGLDFACDIYIWAPLAGTCGVLLLSLVITLYCNHRNWRRKRKEKQSETSPKEFLTIYEDVKDLKTRRNHEQEQTFPGGGSTIYSMIQSQSSAPTSQEPAYTLYSLIQPSRKSGSRKRNHSPSFNSTIYEVIGKSQPKAQNPARLSRKELENFDVYSRVKFSRSADAPAYQQGQNQLYNELNLGRREEYDVLDKRRGRDPEMGGKPRRKNPQEGLYNELQKDKMAEAYSEIGMKGERRRGKGHDGLYQGLSTATKDTYDALHMQALPPR

SEQ ID NO: 2579 - protein, 485 aa, Artificial Sequence
  synthetic polypeptide
MALPVTALLLPLALLLHAARPQVQLVQSGAEVKKPGASVKVSCKASGYTFTNYGMNWVRQAPGQGLKWMGWINTYTGEPTYADAFKGRVTMTRDTSISTAYMELSRLRSDDTAVYYCARDYGDYGMDYWGQGTTVTVSSGGGGSGGGGSGGGGSGDIVMTQSPDSLAVSLGERATINCRASKSVSTSGYSFMHWYQQKPGQPPKLLIYLASNLESGVPDRFSGSGSGTDFTLTISSLQAEDVAVYYCQHSREVPWTFGQGTKVEIKFVPVFLPAKPTTTPAPRPPTPAPTIASQPLSLRPEACRPAAGGAVHTRGLDFACDIYIWAPLAGTCGVLLLSLVITLYCNHRNLCARPRRSPAQEDGKVYINMPGRGRVKFSRSADAPAYQQGQNQLYNELNLGRREEYDVLDKRRGRDPEMGGKPRRKNPQEGLYNELQKDKMAEAYSEIGMKGERRRGKGHDGLYQGLSTATKDTYDALHMQALPPR

SEQ ID NO: 2580 - protein, 513 aa, Artificial Sequence
  synthetic polypeptide
MALPVTALLLPLALLLHAARPQVQLVQSGAEVKKPGASVKVSCKASGYTFTNYGMNWVRQAPGQGLKWMGWINTYTGEPTYADAFKGRVTMTRDTSISTAYMELSRLRSDDTAVYYCARDYGDYGMDYWGQGTTVTVSSGGGGSGGGGSGGGGSGDIVMTQSPDSLAVSLGERATINCRASKSVSTSGYSFMHWYQQKPGQPPKLLIYLASNLESGVPDRFSGSGSGTDFTLTISSLQAEDVAVYYCQHSREVPWTFGQGTKVEIKFVPVFLPAKPTTTPAPRPPTPAPTIASQPLSLRPEACRPAAGGAVHTRGLDFACDIYIWAPLAGTCGVLLLSLVITLYCNHRNYFLGRLVPRGRGAAEAATRKQRITETESPYQELQGQRSDVYSDLNTQRPYYKRVKFSRSADAPAYQQGQNQLYNELNLGRREEYDVLDKRRGRDPEMGGKPRRKNPQEGLYNELQKDKMAEAYSEIGMKGERRRGKGHDGLYQGLSTATKDTYDALHMQALPPR

SEQ ID NO: 2581 - protein, 503 aa, Artificial Sequence
  synthetic polypeptide
MALPVTALLLPLALLLHAARPQVQLVQSGAEVKKPGASVKVSCKASGYTFTNYGMNWVRQAPGQGLKWMGWINTYTGEPTYADAFKGRVTMTRDTSISTAYMELSRLRSDDTAVYYCARDYGDYGMDYWGQGTTVTVSSGGGGSGGGGSGGGGSGDIVMTQSPDSLAVSLGERATINCRASKSVSTSGYSFMHWYQQKPGQPPKLLIYLASNLESGVPDRFSGSGSGTDFTLTISSLQAEDVAVYYCQHSREVPWTFGQGTKVEIKFVPVFLPAKPTTTPAPRPPTPAPTIASQPLSLRPEACRPAAGGAVHTRGLDFACDIYIWAPLAGTCGVLLLSLVITLYCNHRNALYLLRRDQRLPPDAHKPPGGGSFRTPIQEEQADAHSTLAKIRVKFSRSADAPAYQQGQNQLYNELNLGRREEYDVLDKRRGRDPEMGGKPRRKNPQEGLYNELQKDKMAEAYSEIGMKGERRRGKGHDGLYQGLSTATKDTYDALHMQALPPR

SEQ ID NO: 2582 - protein, 583 aa, Artificial Sequence
  synthetic polypeptide
MALPVTALLLPLALLLHAARPQVQLVQSGAEVKKPGASVKVSCKASGYTFTNYGMNWVRQAPGQGLKWMGWINTYTGEPTYADAFKGRVTMTRDTSISTAYMELSRLRSDDTAVYYCARDYGDYGMDYWGQGTTVTVSSGGGGSGGGGSGGGGSGDIVMTQSPDSLAVSLGERATINCRASKSVSTSGYSFMHWYQQKPGQPPKLLIYLASNLESGVPDRFSGSGSGTDFTLTISSLQAEDVAVYYCQHSREVPWTFGQGTKVEIKFVPVFLPAKPTTTPAPRPPTPAPTIASQPLSLRPEACRPAAGGAVHTRGLDFACDPFFFCCFIAVAMGIRFIIMVAIWSAVFLNSWRRKRKEKQSETSPKEFLTIYEDVKDLKTRRNHEQEQTFPGGGSTIYSMIQSQSSAPTSQEPAYTLYSLIQPSRKSGSRKRNHSPSFNSTIYEVIGKSQPKAQNPARLSRKELENFDVYSRVKFSRSADAPAYQQGQNQLYNELNLGRREEYDVLDKRRGRDPEMGGKPRRKNPQEGLYNELQKDKMAEAYSEIGMKGERRRGKGHDGLYQGLSTATKDTYDALHMQALPPR

SEQ ID NO: 2583 - protein, 478 aa, Artificial Sequence
  synthetic polypeptide
MALPVTALLLPLALLLHAARPQVQLVQSGAEVKKPGASVKVSCKASGYTFTNYGMNWVRQAPGQGLKWMGWINTYTGEPTYADAFKGRVTMTRDTSISTAYMELSRLRSDDTAVYYCARDYGDYGMDYWGQGTTVTVSSGGGGSGGGGSGGGGSGDIVMTQSPDSLAVSLGERATINCRASKSVSTSGYSFMHWYQQKPGQPPKLLIYLASNLESGVPDRFSGSGSGTDFTLTISSLQAEDVAVYYCQHSREVPWTFGQGTKVEIKFVPVFLPAKPTTTPAPRPPTPAPTIASQPLSLRPEACRPAAGGAVHTRGLDFACDLLAGLVAADAVASLLIVGAVFLCARPRRSPAQEDGKVYINMPGRGRVKFSRSADAPAYQQGQNQLYNELNLGRREEYDVLDKRRGRDPEMGGKPRRKNPQEGLYNELQKDKMAEAYSEIGMKGERRRGKGHDGLYQGLSTATKDTYDALHMQALPPR

SEQ ID NO: 2584 - protein, 506 aa, Artificial Sequence
  synthetic polypeptide
MALPVTALLLPLALLLHAARPQVQLVQSGAEVKKPGASVKVSCKASGYTFTNYGMNWVRQAPGQGLKWMGWINTYTGEPTYADAFKGRVTMTRDTSISTAYMELSRLRSDDTAVYYCARDYGDYGMDYWGQGTTVTVSSGGGGSGGGGSGGGGSGDIVMTQSPDSLAVSLGERATINCRASKSVSTSGYSFMHWYQQKPGQPPKLLIYLASNLESGVPDRFSGSGSGTDFTLTISSLQAEDVAVYYCQHSREVPWTFGQGTKVEIKFVPVFLPAKPTTTPAPRPPTPAPTIASQPLSLRPEACRPAAGGAVHTRGLDFACDGVLAGIVMGDLVLTVLIALAVYFLGRLVPRGRGAAEAATRKQRITETESPYQELQGQRSDVYSDLNTQRPYYKRVKFSRSADAPAYQQGQNQLYNELNLGRREEYDVLDKRRGRDPEMGGKPRRKNPQEGLYNELQKDKMAEAYSEIGMKGERRRGKGHDGLYQGLSTATKDTYDALHMQALPPR

SEQ ID NO: 2585 - protein, 394 aa, Artificial Sequence
  synthetic polypeptide
MALPVTALLLPLALLLHAARPQVQLVQSGAEVKKPGASVKVSCKASGYTFTNYGMNWVRQAPGQGLKWMGWINTYTGEPTYADAFKGRVTMTRDTSISTAYMELSRLRSDDTAVYYCARDYGDYGMDYWGQGTTVTVSSGGGGSGGGGSGGGGSGDIVMTQSPDSLAVSLGERATINCRASKSVSTSGYSFMHWYQQKPGQPPKLLIYLASNLESGVPDRFSGSGSGTDFTLTISSLQAEDVAVYYCQHSREVPWTFGQGTKVEIKFVPVFLPAKPTTTPAPRPPTPAPTIASQPLSLRPEACRPAAGGAVHTRGLDFACDGVLAGIVMGDLVLTVLIALAVYFLGRLVPRGRGAAEAATRKQRITETESPYQELQGQRSDVYSDLNTQRPYYK

SEQ ID NO: 2586 - protein, 441 aa, Artificial Sequence
  synthetic polypeptide
MALPVTALLLPLALLLHAARPQVQLVQSGAEVKKPGASVKVSCKASGYTFTNYGMNWVRQAPGQGLKWMGWINTYTGEPTYADAFKGRVTMTRDTSISTAYMELSRLRSDDTAVYYCARDYGDYGMDYWGQGTTVTVSSGGGGSGGGGSGGGGSGDIVMTQSPDSLAVSLGERATINCRASKSVSTSGYSFMHWYQQKPGQPPKLLIYLASNLESGVPDRFSGSGSGTDFTLTISSLQAEDVAVYYCQHSREVPWTFGQGTKVEIKFVPVFLPAKPTTTPAPRPPTPAPTIASQPLSLRPEACRPAAGGAVHTRGLDFACDFWVLVVVGGVLACYSLLVTVAFIIFWVRSKRSRLLHSDYMNMTPRRPGPTRKHYQPYAPPRDFAAYRSYFLGRLVPRGRGAAEAATRKQRITETESPYQELQGQRSDVYSDLNTQRPYYK

SEQ ID NO: 2587 - protein, 444 aa, Artificial Sequence
  synthetic polypeptide
MALPVTALLLPLALLLHAARPQVQLVQSGAEVKKPGASVKVSCKASGYTFTNYGMNWVRQAPGQGLKWMGWINTYTGEPTYADAFKGRVTMTRDTSISTAYMELSRLRSDDTAVYYCARDYGDYGMDYWGQGTTVTVSSGGGGSGGGGSGGGGSGDIVMTQSPDSLAVSLGERATINCRASKSVSTSGYSFMHWYQQKPGQPPKLLIYLASNLESGVPDRFSGSGSGTDFTLTISSLQAEDVAVYYCQHSREVPWTFGQGTKVEIKFVPVFLPAKPTTTPAPRPPTPAPTIASQPLSLRPEACRPAAGGAVHTRGLDFACDIYIWAPLAGTCGVLLLSLVITLYCNHRNRKRGRKKLLYIFKQPFMRPVQTTQEEDGCSCRFPEEEEGGCELYFLGRLVPRGRGAAEAATRKQRITETESPYQELQGQRSDVYSDLNTQRPYYK

SEQ ID NO: 2588 - protein, 443 aa, Artificial Sequence
  synthetic polypeptide
MALPVTALLLPLALLLHAARPQVQLVQSGAEVKKPGASVKVSCKASGYTFTNYGMNWVRQAPGQGLKWMGWINTYTGEPTYADAFKGRVTMTRDTSISTAYMELSRLRSDDTAVYYCARDYGDYGMDYWGQGTTVTVSSGGGGSGGGGSGGGGSGDIVMTQSPDSLAVSLGERATINCRASKSVSTSGYSFMHWYQQKPGQPPKLLIYLASNLESGVPDRFSGSGSGTDFTLTISSLQAEDVAVYYCQHSREVPWTFGQGTKVEIKFVPVFLPAKPTTTPAPRPPTPAPTIASQPLSLRPEACRPAAGGAVHTRGLDFACDIYIWAPLAGTCGVLLLSLVITLYCNHRNALYLLRRDQRLPPDAHKPPGGGSFRTPIQEEQADAHSTLAKIYFLGRLVPRGRGAAEAATRKQRITETESPYQELQGQRSDVYSDLNTQRPYYK

SEQ ID NO: 2589 - protein, 425 aa, Artificial Sequence
  synthetic polypeptide
MALPVTALLLPLALLLHAARPQVQLVQSGAEVKKPGASVKVSCKASGYTFTNYGMNWVRQAPGQGLKWMGWINTYTGEPTYADAFKGRVTMTRDTSISTAYMELSRLRSDDTAVYYCARDYGDYGMDYWGQGTTVTVSSGGGGSGGGGSGGGGSGDIVMTQSPDSLAVSLGERATINCRASKSVSTSGYSFMHWYQQKPGQPPKLLIYLASNLESGVPDRFSGSGSGTDFTLTISSLQAEDVAVYYCQHSREVPWTFGQGTKVEIKFVPVFLPAKPTTTPAPRPPTPAPTIASQPLSLRPEACRPAAGGAVHTRGLDFACDIYIWAPLAGTCGVLLLSLVITLYCNHRNLCARPRRSPAQEDGKVYINMPGRGYFLGRLVPRGRGAAEAATRKQRITETESPYQELQGQRSDVYSDLNTQRPYYK

SEQ ID NO: 2590 - protein, 431 aa, Artificial Sequence
  synthetic polypeptide
MALPVTALLLPLALLLHAARPQVQLVQSGAEVKKPGASVKVSCKASGYTFTNYGMNWVRQAPGQGLKWMGWINTYTGEPTYADAFKGRVTMTRDTSISTAYMELSRLRSDDTAVYYCARDYGDYGMDYWGQGTTVTVSSGGGGSGGGGSGGGGSGDIVMTQSPDSLAVSLGERATINCRASKSVSTSGYSFMHWYQQKPGQPPKLLIYLASNLESGVPDRFSGSGSGTDFTLTISSLQAEDVAVYYCQHSREVPWTFGQGTKVEIKFVPVFLPAKPTTTPAPRPPTPAPTIASQPLSLRPEACRPAAGGAVHTRGLDFACDFWVLVVVGGVLACYSLLVTVAFIIFWVRSKRSRLLHSDYMNMTPRRPGPTRKHYQPYAPPRDFAAYRSRLKIQVRKAAITSYEKSDGVYTGLSTRNQETYETLKHEKPPQ

SEQ ID NO: 2591 - protein, 434 aa, Artificial Sequence
  synthetic polypeptide
MALPVTALLLPLALLLHAARPQVQLVQSGAEVKKPGASVKVSCKASGYTFTNYGMNWVRQAPGQGLKWMGWINTYTGEPTYADAFKGRVTMTRDTSISTAYMELSRLRSDDTAVYYCARDYGDYGMDYWGQGTTVTVSSGGGGSGGGGSGGGGSGDIVMTQSPDSLAVSLGERATINCRASKSVSTSGYSFMHWYQQKPGQPPKLLIYLASNLESGVPDRFSGSGSGTDFTLTISSLQAEDVAVYYCQHSREVPWTFGQGTKVEIKFVPVFLPAKPTTTPAPRPPTPAPTIASQPLSLRPEACRPAAGGAVHTRGLDFACDIYIWAPLAGTCGVLLLSLVITLYCNHRNRKRGRKKLLYIFKQPFMRPVQTTQEEDGCSCRFPEEEEGGCELRLKIQVRKAAITSYEKSDGVYTGLSTRNQETYETLKHEKPPQ

SEQ ID NO: 2592 - protein, 433 aa, Artificial Sequence
  synthetic polypeptide
MALPVTALLLPLALLLHAARPQVQLVQSGAEVKKPGASVKVSCKASGYTFTNYGMNWVRQAPGQGLKWMGWINTYTGEPTYADAFKGRVTMTRDTSISTAYMELSRLRSDDTAVYYCARDYGDYGMDYWGQGTTVTVSSGGGGSGGGGSGGGGSGDIVMTQSPDSLAVSLGERATINCRASKSVSTSGYSFMHWYQQKPGQPPKLLIYLASNLESGVPDRFSGSGSGTDFTLTISSLQAEDVAVYYCQHSREVPWTFGQGTKVEIKFVPVFLPAKPTTTPAPRPPTPAPTIASQPLSLRPEACRPAAGGAVHTRGLDFACDIYIWAPLAGTCGVLLLSLVITLYCNHRNALYLLRRDQRLPPDAHKPPGGGSFRTPIQEEQADAHSTLAKIRLKIQVRKAAITSYEKSDGVYTGLSTRNQETYETLKHEKPPQ

SEQ ID NO: 2593 - protein, 415 aa, Artificial Sequence
  synthetic polypeptide
MALPVTALLLPLALLLHAARPQVQLVQSGAEVKKPGASVKVSCKASGYTFTNYGMNWVRQAPGQGLKWMGWINTYTGEPTYADAFKGRVTMTRDTSISTAYMELSRLRSDDTAVYYCARDYGDYGMDYWGQGTTVTVSSGGGGSGGGGSGGGGSGDIVMTQSPDSLAVSLGERATINCRASKSVSTSGYSFMHWYQQKPGQPPKLLIYLASNLESGVPDRFSGSGSGTDFTLTISSLQAEDVAVYYCQHSREVPWTFGQGTKVEIKFVPVFLPAKPTTTPAPRPPTPAPTIASQPLSLRPEACRPAAGGAVHTRGLDFACDIYIWAPLAGTCGVLLLSLVITLYCNHRNLCARPRRSPAQEDGKVYINMPGRGRLKIQVRKAAITSYEKSDGVYTGLSTRNQETYETLKHEKPPQ

SEQ ID NO: 2594 - protein, 161 aa, Artificial Sequence
  synthetic polypeptide
RISKPHLRSISIQCYLCLLLNSHFLTEAGIHVFILGCFSAGLPKTEANWVNVISDLKKIEDLIQSMHIDATLYTESDVHPSCKVTAMKCFLLELQVISLESGDASIHDTVENLIILANNSLSSNGNVTESGCKECEELEEKNIKEFLQSFVHIVQMFINTS

SEQ ID NO: 2595 - protein, 266 aa, Homo sapiens
APRRARGCRTLGLPALLLLLLLRPPATRGITCPPPMSVEHADIWVKSYSLYSRERYICNSGFKRKAGTSSLTECVLNKATNVAHWTTPSLKCIRDPALVHQRPAPPSTVTTAGVTPQPESLSPSGKEPAASSPSSNNTAATTAAIVPGSQLMPSKSPSTGTTEISSHESSHGTPSQTTAKNWELTASASHQPPGVYPQGHSDTTVAISTSTVLLCGLSAVSLLACYLKSRQTPPLASVEMEAMEALPVTWGTSSRDEDLENCSHHL

SEQ ID NO: 2596 - protein, 192 aa, Homo sapiens
AAEPVEDNCINFVAMKFIDNTLYFIAEDDENLESDYFGKLESKLSVIRNLNDQVLFIDQGNRPLFEDMTDSDCRDNAPRTIFIISMYKDSQPRGMAVTISVKCEKISTLSCENKIISFKEMNPPDNIKDTKSDIIFFQRSVPGHDNKMQFESSSYEGYFLACEKERDLFKLILKKEDELGDRSIMFTVQNED

SEQ ID NO: 2597 - protein, 161 aa, Homo sapiens
RSSPGNMERIVICLMVIFLGTLVHKSSSQGQDRHMIRMRQLIDIVDQLKNYVNDLVPEFLPAPEDVETNCEWSAFSCFQKAQLKSANTGNNERIINVSIKKLKRKPPSTNAGRRQKHRLTCPSCDSYEKKPPKEFLERFKSLLQKMIHQHLSSRTHGSEDS

SEQ ID NO: 2598 - protein, 549 aa, Artificial Sequence
  synthetic polypeptide
MARPHPWWLCVLGTLVGLSATPAPKSCPERHYWAQGKLCCQMCEPGTFLVKDCDQHRKAAQCDPCIPGVSFSPDHHTRPHCESCRHCNSGLLVRNCTITANAECACRNGWQCRDKECTECDPLPNPSLTARSSQALSPHPQPTHLPYVSEMLEARTAGHMQTLADFRQLPARTLSTHWPPQRSLCSSDFIRILVIFSGMFLVFTLAGALFLRKRGRKKLLYIFKQPFMRPVQTTQEEDGCSCRFPEEEEGGCELRVKFSRSADAPAYQQGQNQLYNELNLGRREEYDVLDKRRGRDPEMGGKPRRKNPQEGLYNELQKDKMAEAYSEIGMKGERRRGKGHDGLYQGLSTATKDTYDALHMQALPPRGSGATNFSLLKQAGDVEENPGPRISKPHLRSISIQCYLCLLLNSHFLTEAGIHVFILGCFSAGLPKTEANWVNVISDLKKIEDLIQSMHIDATLYTESDVHPSCKVTAMKCFLLELQVISLESGDASIHDTVENLIILANNSLSSNGNVTESGCKECEELEEKNIKEFLQSFVHIVQMFINTS

SEQ ID NO: 2599 - protein, 837 aa, Artificial Sequence
  synthetic polypeptide
MARPHPWWLCVLGTLVGLSATPAPKSCPERHYWAQGKLCCQMCEPGTFLVKDCDQHRKAAQCDPCIPGVSFSPDHHTRPHCESCRHCNSGLLVRNCTITANAECACRNGWQCRDKECTECDPLPNPSLTARSSQALSPHPQPTHLPYVSEMLEARTAGHMQTLADFRQLPARTLSTHWPPQRSLCSSDFIRILVIFSGMFLVFTLAGALFLRKRGRKKLLYIFKQPFMRPVQTTQEEDGCSCRFPEEEEGGCELRVKFSRSADAPAYQQGQNQLYNELNLGRREEYDVLDKRRGRDPEMGGKPRRKNPQEGLYNELQKDKMAEAYSEIGMKGERRRGKGHDGLYQGLSTATKDTYDALHMQALPPRGSGATNFSLLKQAGDVEENPGPAPRRARGCRTLGLPALLLLLLLRPPATRGITCPPPMSVEHADIWVKSYSLYSRERYICNSGFKRKAGTSSLTECVLNKATNVAHWTTPSLKCIRDPALVHQRPAPPSTVTTAGVTPQPESLSPSGKEPAASSPSSNNTAATTAAIVPGSQLMPSKSPSTGTTEISSHESSHGTPSQTTAKNWELTASASHQPPGVYPQGHSDTTVAISTSTVLLCGLSAVSLLACYLKSRQTPPLASVEMEAMEALPVTWGTSSRDEDLENCSHHLGSGATNFSLLKQAGDVEENPGPRISKPHLRSISIQCYLCLLLNSHFLTEAGIHVFILGCFSAGLPKTEANWVNVISDLKKIEDLIQSMHIDATLYTESDVHPSCKVTAMKCFLLELQVISLESGDASIHDTVENLIILANNSLSSNGNVTESGCKECEELEEKNIKEFLQSFVHIVQMFINTS

SEQ ID NO: 2600 - protein, 687 aa, Artificial Sequence
  synthetic polypeptide
MALPVTALLLPLALLLHAARPQVQLVQSGAEVKKPGASVKVSCKASGYTFTNYGMNWVRQAPGQGLKWMGWINTYTGEPTYADAFKGRVTMTRDTSISTAYMELSRLRSDDTAVYYCARDYGDYGMDYWGQGTTVTVSSGGGGSGGGGSGGGGSGDIVMTQSPDSLAVSLGERATINCRASKSVSTSGYSFMHWYQQKPGQPPKLLIYLASNLESGVPDRFSGSGSGTDFTLTISSLQAEDVAVYYCQHSREVPWTFGQGTKVEIKFVPVFLPAKPTTTPAPRPPTPAPTIASQPLSLRPEACRPAAGGAVHTRGLDFACDIYIWAPLAGTCGVLLLSLVITLYCNHRNRKRGRKKLLYIFKQPFMRPVQTTQEEDGCSCRFPEEEEGGCELRVKFSRSADAPAYQQGQNQLYNELNLGRREEYDVLDKRRGRDPEMGGKPRRKNPQEGLYNELQKDKMAEAYSEIGMKGERRRGKGHDGLYQGLSTATKDTYDALHMQALPPRGSGATNFSLLKQAGDVEENPGPRISKPHLRSISIQCYLCLLLNSHFLTEAGIHVFILGCFSAGLPKTEANWVNVISDLKKIEDLIQSMHIDATLYTESDVHPSCKVTAMKCFLLELQVISLESGDASIHDTVENLIILANNSLSSNGNVTESGCKECEELEEKNIKEFLQSFVHIVQMFINTS

SEQ ID NO: 2601 - protein, 975 aa, Artificial Sequence
  synthetic polypeptide
MALPVTALLLPLALLLHAARPQVQLVQSGAEVKKPGASVKVSCKASGYTFTNYGMNWVRQAPGQGLKWMGWINTYTGEPTYADAFKGRVTMTRDTSISTAYMELSRLRSDDTAVYYCARDYGDYGMDYWGQGTTVTVSSGGGGSGGGGSGGGGSGDIVMTQSPDSLAVSLGERATINCRASKSVSTSGYSFMHWYQQKPGQPPKLLIYLASNLESGVPDRFSGSGSGTDFTLTISSLQAEDVAVYYCQHSREVPWTFGQGTKVEIKFVPVFLPAKPTTTPAPRPPTPAPTIASQPLSLRPEACRPAAGGAVHTRGLDFACDIYIWAPLAGTCGVLLLSLVITLYCNHRNRKRGRKKLLYIFKQPFMRPVQTTQEEDGCSCRFPEEEEGGCELRVKFSRSADAPAYQQGQNQLYNELNLGRREEYDVLDKRRGRDPEMGGKPRRKNPQEGLYNELQKDKMAEAYSEIGMKGERRRGKGHDGLYQGLSTATKDTYDALHMQALPPRGSGATNFSLLKQAGDVEENPGPAPRRARGCRTLGLPALLLLLLLRPPATRGITCPPPMSVEHADIWVKSYSLYSRERYICNSGFKRKAGTSSLTECVLNKATNVAHWTTPSLKCIRDPALVHQRPAPPSTVTTAGVTPQPESLSPSGKEPAASSPSSNNTAATTAAIVPGSQLMPSKSPSTGTTEISSHESSHGTPSQTTAKNWELTASASHQPPGVYPQGHSDTTVAISTSTVLLCGLSAVSLLACYLKSRQTPPLASVEMEAMEALPVTWGTSSRDEDLENCSHHLGSGATNFSLLKQAGDVEENPGPRISKPHLRSISIQCYLCLLLNSHFLTEAGIHVFILGCFSAGLPKTEANWVNVISDLKKIEDLIQSMHIDATLYTESDVHPSCKVTAMKCFLLELQVISLESGDASIHDTVENLIILANNSLSSNGNVTESGCKECEELEEKNIKEFLQSFVHIVQMFINTS

SEQ ID NO: 2602 - protein, 861 aa, Artificial Sequence
  synthetic polypeptide
MALPVTALLLPLALLLHAARPQVQLVQSGAEVKKPGASVKVSCKASGYTFTNYGMNWVRQAPGQGLKWMGWINTYTGEPTYADAFKGRVTMTRDTSISTAYMELSRLRSDDTAVYYCARDYGDYGMDYWGQGTTVTVSSGGGGSGGGGSGGGGSGDIVMTQSPDSLAVSLGERATINCRASKSVSTSGYSFMHWYQQKPGQPPKLLIYLASNLESGVPDRFSGSGSGTDFTLTISSLQAEDVAVYYCQHSREVPWTFGQGTKVEIKEPKSCDKTHTCPPCPAPELLGGPSVFLFPPKPKDTLMISRTPEVTCVVVDVSHEDPEVKFNWYVDGVEVHNAKTKPREEQYNSTYRVVSVLTVLHQDWLNGKEYKCKVSNKALPAPIEKTISKAKGQPREPQVYTLPPSRDELTKNQVSLTCLVKGFYPSDIAVEWESNGQPENNYKTTPPVLDSDGSFFLYSKLTVDKSRWQQGNVFSCSVMHEALHNHYTQKSLSLSPGKFWVLVVVGGVLACYSLLVTVAFIIFWVRSKRSRLLHSDYMNMTPRRPGPTRKHYQPYAPPRDFAAYRSRVKFSRSADAPAYQQGQNQLYNELNLGRREEYDVLDKRRGRDPEMGGKPRRKNPQEGLYNELQKDKMAEAYSEIGMKGERRRGKGHDGLYQGLSTATKDTYDALHMQALPPRGSGATNFSLLKQAGDVEENPGPRISKPHLRSISIQCYLCLLLNSHFLTEAGIHVFILGCFSAGLPKTEANWVNVISDLKKIEDLIQSMHIDATLYTESDVHPSCKVTAMKCFLLELQVISLESGDASIHDTVENLIILANNSLSSNGNVTESGCKECEELEEKNIKEFLQSFVHIVQMFINTS

SEQ ID NO: 2603 - protein, 1149 aa, Artificial Sequence
  synthetic polypeptide
MALPVTALLLPLALLLHAARPQVQLVQSGAEVKKPGASVKVSCKASGYTFTNYGMNWVRQAPGQGLKWMGWINTYTGEPTYADAFKGRVTMTRDTSISTAYMELSRLRSDDTAVYYCARDYGDYGMDYWGQGTTVTVSSGGGGSGGGGSGGGGSGDIVMTQSPDSLAVSLGERATINCRASKSVSTSGYSFMHWYQQKPGQPPKLLIYLASNLESGVPDRFSGSGSGTDFTLTISSLQAEDVAVYYCQHSREVPWTFGQGTKVEIKEPKSCDKTHTCPPCPAPELLGGPSVFLFPPKPKDTLMISRTPEVTCVVVDVSHEDPEVKFNWYVDGVEVHNAKTKPREEQYNSTYRVVSVLTVLHQDWLNGKEYKCKVSNKALPAPIEKTISKAKGQPREPQVYTLPPSRDELTKNQVSLTCLVKGFYPSDIAVEWESNGQPENNYKTTPPVLDSDGSFFLYSKLTVDKSRWQQGNVFSCSVMHEALHNHYTQKSLSLSPGKFWVLVVVGGVLACYSLLVTVAFIIFWVRSKRSRLLHSDYMNMTPRRPGPTRKHYQPYAPPRDFAAYRSRVKFSRSADAPAYQQGQNQLYNELNLGRREEYDVLDKRRGRDPEMGGKPRRKNPQEGLYNELQKDKMAEAYSEIGMKGERRRGKGHDGLYQGLSTATKDTYDALHMQALPPRGSGATNFSLLKQAGDVEENPGPAPRRARGCRTLGLPALLLLLLLRPPATRGITCPPPMSVEHADIWVKSYSLYSRERYICNSGFKRKAGTSSLTECVLNKATNVAHWTTPSLKCIRDPALVHQRPAPPSTVTTAGVTPQPESLSPSGKEPAASSPSSNNTAATTAAIVPGSQLMPSKSPSTGTTEISSHESSHGTPSQTTAKNWELTASASHQPPGVYPQGHSDTTVAISTSTVLLCGLSAVSLLACYLKSRQTPPLASVEMEAMEALPVTWGTSSRDEDLENCSHHLGSGATNFSLLKQAGDVEENPGPRISKPHLRSISIQCYLCLLLNSHFLTEAGIHVFILGCFSAGLPKTEANWVNVISDLKKIEDLIQSMHIDATLYTESDVHPSCKVTAMKCFLLELQVISLESGDASIHDTVENLIILANNSLSSNGNVTESGCKECEELEEKNIKEFLQSFVHIVQMFINTS

SEQ ID NO: 2604 - protein, 555 aa, Artificial Sequence
  synthetic polypeptide
MARPHPWWLCVLGTLVGLSATPAPKSCPERHYWAQGKLCCQMCEPGTFLVKDCDQHRKAAQCDPCIPGVSFSPDHHTRPHCESCRHCNSGLLVRNCTITANAECACRNGWQCRDKECTECDPLPNPSLTARSSQALSPHPQPTHLPYVSEMLEARTAGHMQTLADFRQLPARTLSTHWPPQRSLCSSDFIRILVIFSGMFLVFTLAGALFLHQRRKYRSNKGESPVEPAEPCHYSCPREEEGSTIPIQEDYRKPEPACSPRVKFSRSADAPAYQQGQNQLYNELNLGRREEYDVLDKRRGRDPEMGGKPRRKNPQEGLYNELQKDKMAEAYSEIGMKGERRRGKGHDGLYQGLSTATKDTYDALHMQALPPRGSGATNFSLLKQAGDVEENPGPRISKPHLRSISIQCYLCLLLNSHFLTEAGIHVFILGCFSAGLPKTEANWVNVISDLKKIEDLIQSMHIDATLYTESDVHPSCKVTAMKCFLLELQVISLESGDASIHDTVENLIILANNSLSSNGNVTESGCKECEELEEKNIKEFLQSFVHIVQMFINTS

SEQ ID NO: 2605 - protein, 685 aa, Artificial Sequence
  synthetic polypeptide
MALPVTALLLPLALLLHAARPQVQLVQSGAEVKKPGASVKVSCKASGYTFTNYGMNWVRQAPGQGLKWMGWINTYTGEPTYADAFKGRVTMTRDTSISTAYMELSRLRSDDTAVYYCARDYGDYGMDYWGQGTTVTVSSGGGGSGGGGSGGGGSGDIVMTQSPDSLAVSLGERATINCRASKSVSTSGYSFMHWYQQKPGQPPKLLIYLASNLESGVPDRFSGSGSGTDFTLTISSLQAEDVAVYYCQHSREVPWTFGQGTKVEIKFVPVFLPAKPTTTPAPRPPTPAPTIASQPLSLRPEACRPAAGGAVHTRGLDFACDIYIWAPLAGTCGVLLLSLVITLYCNHRNRSKRSRLLHSDYMNMTPRRPGPTRKHYQPYAPPRDFAAYRSRVKFSRSADAPAYQQGQNQLYNELNLGRREEYDVLDKRRGRDPEMGGKPRRKNPQEGLYNELQKDKMAEAYSEIGMKGERRRGKGHDGLYQGLSTATKDTYDALHMQALPPRGSGATNFSLLKQAGDVEENPGPRISKPHLRSISIQCYLCLLLNSHFLTEAGIHVFILGCFSAGLPKTEANWVNVISDLKKIEDLIQSMHIDATLYTESDVHPSCKVTAMKCFLLELQVISLESGDASIHDTVENLIILANNSLSSNGNVTESGCKECEELEEKNIKEFLQSFVHIVQMFINTS

SEQ ID NO: 2606 - protein, 843 aa, Artificial Sequence
  synthetic polypeptide
MARPHPWWLCVLGTLVGLSATPAPKSCPERHYWAQGKLCCQMCEPGTFLVKDCDQHRKAAQCDPCIPGVSFSPDHHTRPHCESCRHCNSGLLVRNCTITANAECACRNGWQCRDKECTECDPLPNPSLTARSSQALSPHPQPTHLPYVSEMLEARTAGHMQTLADFRQLPARTLSTHWPPQRSLCSSDFIRILVIFSGMFLVFTLAGALFLHQRRKYRSNKGESPVEPAEPCHYSCPREEEGSTIPIQEDYRKPEPACSPRVKFSRSADAPAYQQGQNQLYNELNLGRREEYDVLDKRRGRDPEMGGKPRRKNPQEGLYNELQKDKMAEAYSEIGMKGERRRGKGHDGLYQGLSTATKDTYDALHMQALPPRGSGATNFSLLKQAGDVEENPGPAPRRARGCRTLGLPALLLLLLLRPPATRGITCPPPMSVEHADIWVKSYSLYSRERYICNSGFKRKAGTSSLTECVLNKATNVAHWTTPSLKCIRDPALVHQRPAPPSTVTTAGVTPQPESLSPSGKEPAASSPSSNNTAATTAAIVPGSQLMPSKSPSTGTTEISSHESSHGTPSQTTAKNWELTASASHQPPGVYPQGHSDTTVAISTSTVLLCGLSAVSLLACYLKSRQTPPLASVEMEAMEALPVTWGTSSRDEDLENCSHHLGSGATNFSLLKQAGDVEENPGPRISKPHLRSISIQCYLCLLLNSHFLTEAGIHVFILGCFSAGLPKTEANWVNVISDLKKIEDLIQSMHIDATLYTESDVHPSCKVTAMKCFLLELQVISLESGDASIHDTVENLIILANNSLSSNGNVTESGCKECEELEEKNIKEFLQSFVHIVQMFINTS

SEQ ID NO: 2607 - protein, 973 aa, Artificial Sequence
  synthetic polypeptide
MALPVTALLLPLALLLHAARPQVQLVQSGAEVKKPGASVKVSCKASGYTFTNYGMNWVRQAPGQGLKWMGWINTYTGEPTYADAFKGRVTMTRDTSISTAYMELSRLRSDDTAVYYCARDYGDYGMDYWGQGTTVTVSSGGGGSGGGGSGGGGSGDIVMTQSPDSLAVSLGERATINCRASKSVSTSGYSFMHWYQQKPGQPPKLLIYLASNLESGVPDRFSGSGSGTDFTLTISSLQAEDVAVYYCQHSREVPWTFGQGTKVEIKFVPVFLPAKPTTTPAPRPPTPAPTIASQPLSLRPEACRPAAGGAVHTRGLDFACDIYIWAPLAGTCGVLLLSLVITLYCNHRNRSKRSRLLHSDYMNMTPRRPGPTRKHYQPYAPPRDFAAYRSRVKFSRSADAPAYQQGQNQLYNELNLGRREEYDVLDKRRGRDPEMGGKPRRKNPQEGLYNELQKDKMAEAYSEIGMKGERRRGKGHDGLYQGLSTATKDTYDALHMQALPPRGSGATNFSLLKQAGDVEENPGPAPRRARGCRTLGLPALLLLLLLRPPATRGITCPPPMSVEHADIWVKSYSLYSRERYICNSGFKRKAGTSSLTECVLNKATNVAHWTTPSLKCIRDPALVHQRPAPPSTVTTAGVTPQPESLSPSGKEPAASSPSSNNTAATTAAIVPGSQLMPSKSPSTGTTEISSHESSHGTPSQTTAKNWELTASASHQPPGVYPQGHSDTTVAISTSTVLLCGLSAVSLLACYLKSRQTPPLASVEMEAMEALPVTWGTSSRDEDLENCSHHLGSGATNFSLLKQAGDVEENPGPRISKPHLRSISIQCYLCLLLNSHFLTEAGIHVFILGCFSAGLPKTEANWVNVISDLKKIEDLIQSMHIDATLYTESDVHPSCKVTAMKCFLLELQVISLESGDASIHDTVENLIILANNSLSSNGNVTESGCKECEELEEKNIKEFLQSFVHIVQMFINTS

SEQ ID NO: 2608 - protein, 1055 aa, Artificial Sequence
  synthetic polypeptide
MARPHPWWLCVLGTLVGLSATPAPKSCPERHYWAQGKLCCQMCEPGTFLVKDCDQHRKAAQCDPCIPGVSFSPDHHTRPHCESCRHCNSGLLVRNCTITANAECACRNGWQCRDKECTECDPLPNPSLTARSSQALSPHPQPTHLPYVSEMLEARTAGHMQTLADFRQLPARTLSTHWPPQRSLCSSDFIRILVIFSGMFLVFTLAGALFLHQRRKYRSNKGESPVEPAEPCHYSCPREEEGSTIPIQEDYRKPEPACSPRVKFSRSADAPAYQQGQNQLYNELNLGRREEYDVLDKRRGRDPEMGGKPRRKNPQEGLYNELQKDKMAEAYSEIGMKGERRRGKGHDGLYQGLSTATKDTYDALHMQALPPRGSGATNFSLLKQAGDVEENPGPMCPARSLLLVATLVLLDHLSLARNLPVATPDPGMFPCLHHSQNLLRAVSNMLQKARQTLEFYPCTSEEIDHEDITKDKTSTVEACLPLELTKNESCLNSRETSFITNGSCLASRKTSFMMALCLSSIYEDLKMYQVEFKTMNAKLLMDPKRQIFLDQNMLAVIDELMQALNFNSETVPQKSSLEEPDFYKTKIKLCILLHAFRIRAVTIDRVMSYLNASGSGSGSGSGSGSGSGSGSGSGSGSGSGSGSVAISTSTVLLCGLSAVSLLACYLKSRQTPPLASVEMEAMEALPVTWGTSSRDEDLENCSHHLGSGATNFSLLKQAGDVEENPGPMCHQQLVISWFSLVFLASPLVAIWELKKDVYVVELDWYPDAPGEMVVLTCDTPEEDGITWTLDQSSEVLGSGKTLTIQVKEFGDAGQYTCHKGGEVLSHSLLLLHKKEDGIWSTDILKDQKEPKNKTFLRCEAKNYSGRFTCWWLTTISTDLTFSVKSSRGSSDPQGVTCGAATLSAERVRGDNKEYEYSVECQEDSACPAAEESLPIEVMVDAVHKLKYENYTSSFFIRDIIKPDPPKNLQLKPLKNSRQVEVSWEYPDTWSTPHSYFSLTFCVQVQGKSKREKKDRVFTDKTSATVICRKNASISVRAQDRYYSSSWSEWASVPCS

SEQ ID NO: 2609 - protein, 1049 aa, Artificial Sequence
  synthetic polypeptide
MARPHPWWLCVLGTLVGLSATPAPKSCPERHYWAQGKLCCQMCEPGTFLVKDCDQHRKAAQCDPCIPGVSFSPDHHTRPHCESCRHCNSGLLVRNCTITANAECACRNGWQCRDKECTECDPLPNPSLTARSSQALSPHPQPTHLPYVSEMLEARTAGHMQTLADFRQLPARTLSTHWPPQRSLCSSDFIRILVIFSGMFLVFTLAGALFLRKRGRKKLLYIFKQPFMRPVQTTQEEDGCSCRFPEEEEGGCELRVKFSRSADAPAYQQGQNQLYNELNLGRREEYDVLDKRRGRDPEMGGKPRRKNPQEGLYNELQKDKMAEAYSEIGMKGERRRGKGHDGLYQGLSTATKDTYDALHMQALPPRGSGATNFSLLKQAGDVEENPGPMCPARSLLLVATLVLLDHLSLARNLPVATPDPGMFPCLHHSQNLLRAVSNMLQKARQTLEFYPCTSEEIDHEDITKDKTSTVEACLPLELTKNESCLNSRETSFITNGSCLASRKTSFMMALCLSSIYEDLKMYQVEFKTMNAKLLMDPKRQIFLDQNMLAVIDELMQALNFNSETVPQKSSLEEPDFYKTKIKLCILLHAFRIRAVTIDRVMSYLNASGSGSGSGSGSGSGSGSGSGSGSGSGSGSGSVAISTSTVLLCGLSAVSLLACYLKSRQTPPLASVEMEAMEALPVTWGTSSRDEDLENCSHHLGSGATNFSLLKQAGDVEENPGPMCHQQLVISWFSLVFLASPLVAIWELKKDVYVVELDWYPDAPGEMVVLTCDTPEEDGITWTLDQSSEVLGSGKTLTIQVKEFGDAGQYTCHKGGEVLSHSLLLLHKKEDGIWSTDILKDQKEPKNKTFLRCEAKNYSGRFTCWWLTTISTDLTFSVKSSRGSSDPQGVTCGAATLSAERVRGDNKEYEYSVECQEDSACPAAEESLPIEVMVDAVHKLKYENYTSSFFIRDIIKPDPPKNLQLKPLKNSRQVEVSWEYPDTWSTPHSYFSLTFCVQVQGKSKREKKDRVFTDKTSATVICRKNASISVRAQDRYYSSSWSEWASVPCS

SEQ ID NO: 2610 - protein, 1185 aa, Artificial Sequence
  synthetic polypeptide
MALPVTALLLPLALLLHAARPQVQLVQSGAEVKKPGASVKVSCKASGYTFTNYGMNWVRQAPGQGLKWMGWINTYTGEPTYADAFKGRVTMTRDTSISTAYMELSRLRSDDTAVYYCARDYGDYGMDYWGQGTTVTVSSGGGGSGGGGSGGGGSGDIVMTQSPDSLAVSLGERATINCRASKSVSTSGYSFMHWYQQKPGQPPKLLIYLASNLESGVPDRFSGSGSGTDFTLTISSLQAEDVAVYYCQHSREVPWTFGQGTKVEIKFVPVFLPAKPTTTPAPRPPTPAPTIASQPLSLRPEACRPAAGGAVHTRGLDFACDIYIWAPLAGTCGVLLLSLVITLYCNHRNRSKRSRLLHSDYMNMTPRRPGPTRKHYQPYAPPRDFAAYRSRVKFSRSADAPAYQQGQNQLYNELNLGRREEYDVLDKRRGRDPEMGGKPRRKNPQEGLYNELQKDKMAEAYSEIGMKGERRRGKGHDGLYQGLSTATKDTYDALHMQALPPRGSGATNFSLLKQAGDVEENPGPMCPARSLLLVATLVLLDHLSLARNLPVATPDPGMFPCLHHSQNLLRAVSNMLQKARQTLEFYPCTSEEIDHEDITKDKTSTVEACLPLELTKNESCLNSRETSFITNGSCLASRKTSFMMALCLSSIYEDLKMYQVEFKTMNAKLLMDPKRQIFLDQNMLAVIDELMQALNFNSETVPQKSSLEEPDFYKTKIKLCILLHAFRIRAVTIDRVMSYLNASGSGSGSGSGSGSGSGSGSGSGSGSGSGSGSVAISTSTVLLCGLSAVSLLACYLKSRQTPPLASVEMEAMEALPVTWGTSSRDEDLENCSHHLGSGATNFSLLKQAGDVEENPGPMCHQQLVISWFSLVFLASPLVAIWELKKDVYVVELDWYPDAPGEMVVLTCDTPEEDGITWTLDQSSEVLGSGKTLTIQVKEFGDAGQYTCHKGGEVLSHSLLLLHKKEDGIWSTDILKDQKEPKNKTFLRCEAKNYSGRFTCWWLTTISTDLTFSVKSSRGSSDPQGVTCGAATLSAERVRGDNKEYEYSVECQEDSACPAAEESLPIEVMVDAVHKLKYENYTSSFFIRDIIKPDPPKNLQLKPLKNSRQVEVSWEYPDTWSTPHSYFSLTFCVQVQGKSKREKKDRVFTDKTSATVICRKNASISVRAQDRYYSSSWSEWASVPCS

SEQ ID NO: 2611 - protein, 1187 aa, Artificial Sequence
  synthetic polypeptide
MALPVTALLLPLALLLHAARPQVQLVQSGAEVKKPGASVKVSCKASGYTFTNYGMNWVRQAPGQGLKWMGWINTYTGEPTYADAFKGRVTMTRDTSISTAYMELSRLRSDDTAVYYCARDYGDYGMDYWGQGTTVTVSSGGGGSGGGGSGGGGSGDIVMTQSPDSLAVSLGERATINCRASKSVSTSGYSFMHWYQQKPGQPPKLLIYLASNLESGVPDRFSGSGSGTDFTLTISSLQAEDVAVYYCQHSREVPWTFGQGTKVEIKFVPVFLPAKPTTTPAPRPPTPAPTIASQPLSLRPEACRPAAGGAVHTRGLDFACDIYIWAPLAGTCGVLLLSLVITLYCNHRNRKRGRKKLLYIFKQPFMRPVQTTQEEDGCSCRFPEEEEGGCELRVKFSRSADAPAYQQGQNQLYNELNLGRREEYDVLDKRRGRDPEMGGKPRRKNPQEGLYNELQKDKMAEAYSEIGMKGERRRGKGHDGLYQGLSTATKDTYDALHMQALPPRGSGATNFSLLKQAGDVEENPGPMCPARSLLLVATLVLLDHLSLARNLPVATPDPGMFPCLHHSQNLLRAVSNMLQKARQTLEFYPCTSEEIDHEDITKDKTSTVEACLPLELTKNESCLNSRETSFITNGSCLASRKTSFMMALCLSSIYEDLKMYQVEFKTMNAKLLMDPKRQIFLDQNMLAVIDELMQALNFNSETVPQKSSLEEPDFYKTKIKLCILLHAFRIRAVTIDRVMSYLNASGSGSGSGSGSGSGSGSGSGSGSGSGSGSGSVAISTSTVLLCGLSAVSLLACYLKSRQTPPLASVEMEAMEALPVTWGTSSRDEDLENCSHHLGSGATNFSLLKQAGDVEENPGPMCHQQLVISWFSLVFLASPLVAIWELKKDVYVVELDWYPDAPGEMVVLTCDTPEEDGITWTLDQSSEVLGSGKTLTIQVKEFGDAGQYTCHKGGEVLSHSLLLLHKKEDGIWSTDILKDQKEPKNKTFLRCEAKNYSGRFTCWWLTTISTDLTFSVKSSRGSSDPQGVTCGAATLSAERVRGDNKEYEYSVECQEDSACPAAEESLPIEVMVDAVHKLKYENYTSSFFIRDIIKPDPPKNLQLKPLKNSRQVEVSWEYPDTWSTPHSYFSLTFCVQVQGKSKREKKDRVFTDKTSATVICRKNASISVRAQDRYYSSSWSEWASVPCS

SEQ ID NO: 2612 - protein, 1361 aa, Artificial Sequence
  synthetic polypeptide
MALPVTALLLPLALLLHAARPQVQLVQSGAEVKKPGASVKVSCKASGYTFTNYGMNWVRQAPGQGLKWMGWINTYTGEPTYADAFKGRVTMTRDTSISTAYMELSRLRSDDTAVYYCARDYGDYGMDYWGQGTTVTVSSGGGGSGGGGSGGGGSGDIVMTQSPDSLAVSLGERATINCRASKSVSTSGYSFMHWYQQKPGQPPKLLIYLASNLESGVPDRFSGSGSGTDFTLTISSLQAEDVAVYYCQHSREVPWTFGQGTKVEIKEPKSCDKTHTCPPCPAPELLGGPSVFLFPPKPKDTLMISRTPEVTCVVVDVSHEDPEVKFNWYVDGVEVHNAKTKPREEQYNSTYRVVSVLTVLHQDWLNGKEYKCKVSNKALPAPIEKTISKAKGQPREPQVYTLPPSRDELTKNQVSLTCLVKGFYPSDIAVEWESNGQPENNYKTTPPVLDSDGSFFLYSKLTVDKSRWQQGNVFSCSVMHEALHNHYTQKSLSLSPGKFWVLVVVGGVLACYSLLVTVAFIIFWVRSKRSRLLHSDYMNMTPRRPGPTRKHYQPYAPPRDFAAYRSRVKFSRSADAPAYQQGQNQLYNELNLGRREEYDVLDKRRGRDPEMGGKPRRKNPQEGLYNELQKDKMAEAYSEIGMKGERRRGKGHDGLYQGLSTATKDTYDALHMQALPPRGSGATNFSLLKQAGDVEENPGPMCPARSLLLVATLVLLDHLSLARNLPVATPDPGMFPCLHHSQNLLRAVSNMLQKARQTLEFYPCTSEEIDHEDITKDKTSTVEACLPLELTKNESCLNSRETSFITNGSCLASRKTSFMMALCLSSIYEDLKMYQVEFKTMNAKLLMDPKRQIFLDQNMLAVIDELMQALNFNSETVPQKSSLEEPDFYKTKIKLCILLHAFRIRAVTIDRVMSYLNASGSGSGSGSGSGSGSGSGSGSGSGSGSGSGSVAISTSTVLLCGLSAVSLLACYLKSRQTPPLASVEMEAMEALPVTWGTSSRDEDLENCSHHLGSGATNFSLLKQAGDVEENPGPMCHQQLVISWFSLVFLASPLVAIWELKKDVYVVELDWYPDAPGEMVVLTCDTPEEDGITWTLDQSSEVLGSGKTLTIQVKEFGDAGQYTCHKGGEVLSHSLLLLHKKEDGIWSTDILKDQKEPKNKTFLRCEAKNYSGRFTCWWLTTISTDLTFSVKSSRGSSDPQGVTCGAATLSAERVRGDNKEYEYSVECQEDSACPAAEESLPIEVMVDAVHKLKYENYTSSFFIRDIIKPDPPKNLQLKPLKNSRQVEVSWEYPDTWSTPHSYFSLTFCVQVQGKSKREKKDRVFTDKTSATVICRKNASISVRAQDRYYSSSWSEWASVPCS

SEQ ID NO: 2613 - protein, 586 aa, Artificial Sequence
  synthetic polypeptide
MARPHPWWLCVLGTLVGLSATPAPKSCPERHYWAQGKLCCQMCEPGTFLVKDCDQHRKAAQCDPCIPGVSFSPDHHTRPHCESCRHCNSGLLVRNCTITANAECACRNGWQCRDKECTECDPLPNPSLTARSSQALSPHPQPTHLPYVSEMLEARTAGHMQTLADFRQLPARTLSTHWPPQRSLCSSDFIRILVIFSGMFLVFTLAGALFLHQRRKYRSNKGESPVEPAEPCHYSCPREEEGSTIPIQEDYRKPEPACSPRVKFSRSADAPAYQQGQNQLYNELNLGRREEYDVLDKRRGRDPEMGGKPRRKNPQEGLYNELQKDKMAEAYSEIGMKGERRRGKGHDGLYQGLSTATKDTYDALHMQALPPRGSGATNFSLLKQAGDVEENPGPAAEPVEDNCINFVAMKFIDNTLYFIAEDDENLESDYFGKLESKLSVIRNLNDQVLFIDQGNRPLFEDMTDSDCRDNAPRTIFIISMYKDSQPRGMAVTISVKCEKISTLSCENKIISFKEMNPPDNIKDTKSDIIFFQRSVPGHDNKMQFESSSYEGYFLACEKERDLFKLILKKEDELGDRSIMFTVQNED

SEQ ID NO: 2614 - protein, 580 aa, Artificial Sequence
  synthetic polypeptide
MARPHPWWLCVLGTLVGLSATPAPKSCPERHYWAQGKLCCQMCEPGTFLVKDCDQHRKAAQCDPCIPGVSFSPDHHTRPHCESCRHCNSGLLVRNCTITANAECACRNGWQCRDKECTECDPLPNPSLTARSSQALSPHPQPTHLPYVSEMLEARTAGHMQTLADFRQLPARTLSTHWPPQRSLCSSDFIRILVIFSGMFLVFTLAGALFLRKRGRKKLLYIFKQPFMRPVQTTQEEDGCSCRFPEEEEGGCELRVKFSRSADAPAYQQGQNQLYNELNLGRREEYDVLDKRRGRDPEMGGKPRRKNPQEGLYNELQKDKMAEAYSEIGMKGERRRGKGHDGLYQGLSTATKDTYDALHMQALPPRGSGATNFSLLKQAGDVEENPGPAAEPVEDNCINFVAMKFIDNTLYFIAEDDENLESDYFGKLESKLSVIRNLNDQVLFIDQGNRPLFEDMTDSDCRDNAPRTIFIISMYKDSQPRGMAVTISVKCEKISTLSCENKIISFKEMNPPDNIKDTKSDIIFFQRSVPGHDNKMQFESSSYEGYFLACEKERDLFKLILKKEDELGDRSIMFTVQNED

SEQ ID NO: 2615 - protein, 716 aa, Artificial Sequence
  synthetic polypeptide
MALPVTALLLPLALLLHAARPQVQLVQSGAEVKKPGASVKVSCKASGYTFTNYGMNWVRQAPGQGLKWMGWINTYTGEPTYADAFKGRVTMTRDTSISTAYMELSRLRSDDTAVYYCARDYGDYGMDYWGQGTTVTVSSGGGGSGGGGSGGGGSGDIVMTQSPDSLAVSLGERATINCRASKSVSTSGYSFMHWYQQKPGQPPKLLIYLASNLESGVPDRFSGSGSGTDFTLTISSLQAEDVAVYYCQHSREVPWTFGQGTKVEIKFVPVFLPAKPTTTPAPRPPTPAPTIASQPLSLRPEACRPAAGGAVHTRGLDFACDIYIWAPLAGTCGVLLLSLVITLYCNHRNRSKRSRLLHSDYMNMTPRRPGPTRKHYQPYAPPRDFAAYRSRVKFSRSADAPAYQQGQNQLYNELNLGRREEYDVLDKRRGRDPEMGGKPRRKNPQEGLYNELQKDKMAEAYSEIGMKGERRRGKGHDGLYQGLSTATKDTYDALHMQALPPRGSGATNFSLLKQAGDVEENPGPAAEPVEDNCINFVAMKFIDNTLYFIAEDDENLESDYFGKLESKLSVIRNLNDQVLFIDQGNRPLFEDMTDSDCRDNAPRTIFIISMYKDSQPRGMAVTISVKCEKISTLSCENKIISFKEMNPPDNIKDTKSDIIFFQRSVPGHDNKMQFESSSYEGYFLACEKERDLFKLILKKEDELGDRSIMFTVQNED

SEQ ID NO: 2616 - protein, 718 aa, Artificial Sequence
  synthetic polypeptide
MALPVTALLLPLALLLHAARPQVQLVQSGAEVKKPGASVKVSCKASGYTFTNYGMNWVRQAPGQGLKWMGWINTYTGEPTYADAFKGRVTMTRDTSISTAYMELSRLRSDDTAVYYCARDYGDYGMDYWGQGTTVTVSSGGGGSGGGGSGGGGSGDIVMTQSPDSLAVSLGERATINCRASKSVSTSGYSFMHWYQQKPGQPPKLLIYLASNLESGVPDRFSGSGSGTDFTLTISSLQAEDVAVYYCQHSREVPWTFGQGTKVEIKFVPVFLPAKPTTTPAPRPPTPAPTIASQPLSLRPEACRPAAGGAVHTRGLDFACDIYIWAPLAGTCGVLLLSLVITLYCNHRNRKRGRKKLLYIFKQPFMRPVQTTQEEDGCSCRFPEEEEGGCELRVKFSRSADAPAYQQGQNQLYNELNLGRREEYDVLDKRRGRDPEMGGKPRRKNPQEGLYNELQKDKMAEAYSEIGMKGERRRGKGHDGLYQGLSTATKDTYDALHMQALPPRGSGATNFSLLKQAGDVEENPGPAAEPVEDNCINFVAMKFIDNTLYFIAEDDENLESDYFGKLESKLSVIRNLNDQVLFIDQGNRPLFEDMTDSDCRDNAPRTIFIISMYKDSQPRGMAVTISVKCEKISTLSCENKIISFKEMNPPDNIKDTKSDIIFFQRSVPGHDNKMQFESSSYEGYFLACEKERDLFKLILKKEDELGDRSIMFTVQNED

SEQ ID NO: 2617 - protein, 892 aa, Artificial Sequence
  synthetic polypeptide
MALPVTALLLPLALLLHAARPQVQLVQSGAEVKKPGASVKVSCKASGYTFTNYGMNWVRQAPGQGLKWMGWINTYTGEPTYADAFKGRVTMTRDTSISTAYMELSRLRSDDTAVYYCARDYGDYGMDYWGQGTTVTVSSGGGGSGGGGSGGGGSGDIVMTQSPDSLAVSLGERATINCRASKSVSTSGYSFMHWYQQKPGQPPKLLIYLASNLESGVPDRFSGSGSGTDFTLTISSLQAEDVAVYYCQHSREVPWTFGQGTKVEIKEPKSCDKTHTCPPCPAPELLGGPSVFLFPPKPKDTLMISRTPEVTCVVVDVSHEDPEVKFNWYVDGVEVHNAKTKPREEQYNSTYRVVSVLTVLHQDWLNGKEYKCKVSNKALPAPIEKTISKAKGQPREPQVYTLPPSRDELTKNQVSLTCLVKGFYPSDIAVEWESNGQPENNYKTTPPVLDSDGSFFLYSKLTVDKSRWQQGNVFSCSVMHEALHNHYTQKSLSLSPGKFWVLVVVGGVLACYSLLVTVAFIIFWVRSKRSRLLHSDYMNMTPRRPGPTRKHYQPYAPPRDFAAYRSRVKFSRSADAPAYQQGQNQLYNELNLGRREEYDVLDKRRGRDPEMGGKPRRKNPQEGLYNELQKDKMAEAYSEIGMKGERRRGKGHDGLYQGLSTATKDTYDALHMQALPPRGSGATNFSLLKQAGDVEENPGPAAEPVEDNCINFVAMKFIDNTLYFIAEDDENLESDYFGKLESKLSVIRNLNDQVLFIDQGNRPLFEDMTDSDCRDNAPRTIFIISMYKDSQPRGMAVTISVKCEKISTLSCENKIISFKEMNPPDNIKDTKSDIIFFQRSVPGHDNKMQFESSSYEGYFLACEKERDLFKLILKKEDELGDRSIMFTVQNED

SEQ ID NO: 2618 - protein, 555 aa, Artificial Sequence
  synthetic polypeptide
MARPHPWWLCVLGTLVGLSATPAPKSCPERHYWAQGKLCCQMCEPGTFLVKDCDQHRKAAQCDPCIPGVSFSPDHHTRPHCESCRHCNSGLLVRNCTITANAECACRNGWQCRDKECTECDPLPNPSLTARSSQALSPHPQPTHLPYVSEMLEARTAGHMQTLADFRQLPARTLSTHWPPQRSLCSSDFIRILVIFSGMFLVFTLAGALFLHQRRKYRSNKGESPVEPAEPCHYSCPREEEGSTIPIQEDYRKPEPACSPRVKFSRSADAPAYQQGQNQLYNELNLGRREEYDVLDKRRGRDPEMGGKPRRKNPQEGLYNELQKDKMAEAYSEIGMKGERRRGKGHDGLYQGLSTATKDTYDALHMQALPPRGSGATNFSLLKQAGDVEENPGPRSSPGNMERIVICLMVIFLGTLVHKSSSQGQDRHMIRMRQLIDIVDQLKNYVNDLVPEFLPAPEDVETNCEWSAFSCFQKAQLKSANTGNNERIINVSIKKLKRKPPSTNAGRRQKHRLTCPSCDSYEKKPPKEFLERFKSLLQKMIHQHLSSRTHGSEDS

SEQ ID NO: 2619 - protein, 549 aa, Artificial Sequence
  synthetic polypeptide
MARPHPWWLCVLGTLVGLSATPAPKSCPERHYWAQGKLCCQMCEPGTFLVKDCDQHRKAAQCDPCIPGVSFSPDHHTRPHCESCRHCNSGLLVRNCTITANAECACRNGWQCRDKECTECDPLPNPSLTARSSQALSPHPQPTHLPYVSEMLEARTAGHMQTLADFRQLPARTLSTHWPPQRSLCSSDFIRILVIFSGMFLVFTLAGALFLRKRGRKKLLYIFKQPFMRPVQTTQEEDGCSCRFPEEEEGGCELRVKFSRSADAPAYQQGQNQLYNELNLGRREEYDVLDKRRGRDPEMGGKPRRKNPQEGLYNELQKDKMAEAYSEIGMKGERRRGKGHDGLYQGLSTATKDTYDALHMQALPPRGSGATNFSLLKQAGDVEENPGPRSSPGNMERIVICLMVIFLGTLVHKSSSQGQDRHMIRMRQLIDIVDQLKNYVNDLVPEFLPAPEDVETNCEWSAFSCFQKAQLKSANTGNNERIINVSIKKLKRKPPSTNAGRRQKHRLTCPSCDSYEKKPPKEFLERFKSLLQKMIHQHLSSRTHGSEDS

SEQ ID NO: 2620 - protein, 685 aa, Artificial Sequence
  synthetic polypeptide
MALPVTALLLPLALLLHAARPQVQLVQSGAEVKKPGASVKVSCKASGYTFTNYGMNWVRQAPGQGLKWMGWINTYTGEPTYADAFKGRVTMTRDTSISTAYMELSRLRSDDTAVYYCARDYGDYGMDYWGQGTTVTVSSGGGGSGGGGSGGGGSGDIVMTQSPDSLAVSLGERATINCRASKSVSTSGYSFMHWYQQKPGQPPKLLIYLASNLESGVPDRFSGSGSGTDFTLTISSLQAEDVAVYYCQHSREVPWTFGQGTKVEIKFVPVFLPAKPTTTPAPRPPTPAPTIASQPLSLRPEACRPAAGGAVHTRGLDFACDIYIWAPLAGTCGVLLLSLVITLYCNHRNRSKRSRLLHSDYMNMTPRRPGPTRKHYQPYAPPRDFAAYRSRVKFSRSADAPAYQQGQNQLYNELNLGRREEYDVLDKRRGRDPEMGGKPRRKNPQEGLYNELQKDKMAEAYSEIGMKGERRRGKGHDGLYQGLSTATKDTYDALHMQALPPRGSGATNFSLLKQAGDVEENPGPRSSPGNMERIVICLMVIFLGTLVHKSSSQGQDRHMIRMRQLIDIVDQLKNYVNDLVPEFLPAPEDVETNCEWSAFSCFQKAQLKSANTGNNERIINVSIKKLKRKPPSTNAGRRQKHRLTCPSCDSYEKKPPKEFLERFKSLLQKMIHQHLSSRTHGSEDS

SEQ ID NO: 2621 - protein, 687 aa, Artificial Sequence
  synthetic polypeptide
MALPVTALLLPLALLLHAARPQVQLVQSGAEVKKPGASVKVSCKASGYTFTNYGMNWVRQAPGQGLKWMGWINTYTGEPTYADAFKGRVTMTRDTSISTAYMELSRLRSDDTAVYYCARDYGDYGMDYWGQGTTVTVSSGGGGSGGGGSGGGGSGDIVMTQSPDSLAVSLGERATINCRASKSVSTSGYSFMHWYQQKPGQPPKLLIYLASNLESGVPDRFSGSGSGTDFTLTISSLQAEDVAVYYCQHSREVPWTFGQGTKVEIKFVPVFLPAKPTTTPAPRPPTPAPTIASQPLSLRPEACRPAAGGAVHTRGLDFACDIYIWAPLAGTCGVLLLSLVITLYCNHRNRKRGRKKLLYIFKQPFMRPVQTTQEEDGCSCRFPEEEEGGCELRVKFSRSADAPAYQQGQNQLYNELNLGRREEYDVLDKRRGRDPEMGGKPRRKNPQEGLYNELQKDKMAEAYSEIGMKGERRRGKGHDGLYQGLSTATKDTYDALHMQALPPRGSGATNFSLLKQAGDVEENPGPRSSPGNMERIVICLMVIFLGTLVHKSSSQGQDRHMIRMRQLIDIVDQLKNYVNDLVPEFLPAPEDVETNCEWSAFSCFQKAQLKSANTGNNERIINVSIKKLKRKPPSTNAGRRQKHRLTCPSCDSYEKKPPKEFLERFKSLLQKMIHQHLSSRTHGSEDS

SEQ ID NO: 2622 - protein, 861 aa, Artificial Sequence
  synthetic polypeptide
MALPVTALLLPLALLLHAARPQVQLVQSGAEVKKPGASVKVSCKASGYTFTNYGMNWVRQAPGQGLKWMGWINTYTGEPTYADAFKGRVTMTRDTSISTAYMELSRLRSDDTAVYYCARDYGDYGMDYWGQGTTVTVSSGGGGSGGGGSGGGGSGDIVMTQSPDSLAVSLGERATINCRASKSVSTSGYSFMHWYQQKPGQPPKLLIYLASNLESGVPDRFSGSGSGTDFTLTISSLQAEDVAVYYCQHSREVPWTFGQGTKVEIKEPKSCDKTHTCPPCPAPELLGGPSVFLFPPKPKDTLMISRTPEVTCVVVDVSHEDPEVKFNWYVDGVEVHNAKTKPREEQYNSTYRVVSVLTVLHQDWLNGKEYKCKVSNKALPAPIEKTISKAKGQPREPQVYTLPPSRDELTKNQVSLTCLVKGFYPSDIAVEWESNGQPENNYKTTPPVLDSDGSFFLYSKLTVDKSRWQQGNVFSCSVMHEALHNHYTQKSLSLSPGKFWVLVVVGGVLACYSLLVTVAFIIFWVRSKRSRLLHSDYMNMTPRRPGPTRKHYQPYAPPRDFAAYRSRVKFSRSADAPAYQQGQNQLYNELNLGRREEYDVLDKRRGRDPEMGGKPRRKNPQEGLYNELQKDKMAEAYSEIGMKGERRRGKGHDGLYQGLSTATKDTYDALHMQALPPRGSGATNFSLLKQAGDVEENPGPRSSPGNMERIVICLMVIFLGTLVHKSSSQGQDRHMIRMRQLIDIVDQLKNYVNDLVPEFLPAPEDVETNCEWSAFSCFQKAQLKSANTGNNERIINVSIKKLKRKPPSTNAGRRQKHRLTCPSCDSYEKKPPKEFLERFKSLLQKMIHQHLSSRTHGSEDS

SEQ ID NO: 2623 - protein, 955 aa, Artificial Sequence
  synthetic polypeptide
MARPHPWWLCVLGTLVGLSATPAPKSCPERHYWAQGKLCCQMCEPGTFLVKDCDQHRKAAQCDPCIPGVSFSPDHHTRPHCESCRHCNSGLLVRNCTITANAECACRNGWQCRDKECTECDPLPNPSLTARSSQALSPHPQPTHLPYVSEMLEARTAGHMQTLADFRQLPARTLSTHWPPQRSLCSSDFIRILVIFSGMFLVFTLAGALFLRKRGRKKLLYIFKQPFMRPVQTTQEEDGCSCRFPEEEEGGCELRVKFSRSADAPAYQQGQNQLYNELNLGRREEYDVLDKRRGRDPEMGGKPRRKNPQEGLYNELQKDKMAEAYSEIGMKGERRRGKGHDGLYQGLSTATKDTYDALHMQALPPRGSGATNFSLLKQAGDVEENPGPCPARSLLLVATLVLLDHLSLARNLPVATPDPGMFPCLHHSQNLLRAVSNMLQKARQTLEFYPCTSEEIDHEDITKDKTSTVEACLPLELTKNESCLNSRETSFITNGSCLASRKTSFMMALCLSSIYEDLKMYQVEFKTMNAKLLMDPKRQIFLDQNMLAVIDELMQALNFNSETVPQKSSLEEPDFYKTKIKLCILLHAFRIRAVTIDRVMSYLNASGSGATNFSLLKQAGDVEENPGPCHQQLVISWFSLVFLASPLVAIWELKKDVYVVELDWYPDAPGEMVVLTCDTPEEDGITWTLDQSSEVLGSGKTLTIQVKEFGDAGQYTCHKGGEVLSHSLLLLHKKEDGIWSTDILKDQKEPKNKTFLRCEAKNYSGRFTCWWLTTISTDLTFSVKSSRGSSDPQGVTCGAATLSAERVRGDNKEYEYSVECQEDSACPAAEESLPIEVMVDAVHKLKYENYTSSFFIRDIIKPDPPKNLQLKPLKNSRQVEVSWEYPDTWSTPHSYFSLTFCVQVQGKSKREKKDRVFTDKTSATVICRKNASISVRAQDRYYSSSWSEWASVPCS

SEQ ID NO: 2624 - protein, 1093 aa, Artificial Sequence
  synthetic polypeptide
MALPVTALLLPLALLLHAARPQVQLVQSGAEVKKPGASVKVSCKASGYTFTNYGMNWVRQAPGQGLKWMGWINTYTGEPTYADAFKGRVTMTRDTSISTAYMELSRLRSDDTAVYYCARDYGDYGMDYWGQGTTVTVSSGGGGSGGGGSGGGGSGDIVMTQSPDSLAVSLGERATINCRASKSVSTSGYSFMHWYQQKPGQPPKLLIYLASNLESGVPDRFSGSGSGTDFTLTISSLQAEDVAVYYCQHSREVPWTFGQGTKVEIKFVPVFLPAKPTTTPAPRPPTPAPTIASQPLSLRPEACRPAAGGAVHTRGLDFACDIYIWAPLAGTCGVLLLSLVITLYCNHRNRKRGRKKLLYIFKQPFMRPVQTTQEEDGCSCRFPEEEEGGCELRVKFSRSADAPAYQQGQNQLYNELNLGRREEYDVLDKRRGRDPEMGGKPRRKNPQEGLYNELQKDKMAEAYSEIGMKGERRRGKGHDGLYQGLSTATKDTYDALHMQALPPRGSGATNFSLLKQAGDVEENPGPCPARSLLLVATLVLLDHLSLARNLPVATPDPGMFPCLHHSQNLLRAVSNMLQKARQTLEFYPCTSEEIDHEDITKDKTSTVEACLPLELTKNESCLNSRETSFITNGSCLASRKTSFMMALCLSSIYEDLKMYQVEFKTMNAKLLMDPKRQIFLDQNMLAVIDELMQALNFNSETVPQKSSLEEPDFYKTKIKLCILLHAFRIRAVTIDRVMSYLNASGSGATNFSLLKQAGDVEENPGPCHQQLVISWFSLVFLASPLVAIWELKKDVYVVELDWYPDAPGEMVVLTCDTPEEDGITWTLDQSSEVLGSGKTLTIQVKEFGDAGQYTCHKGGEVLSHSLLLLHKKEDGIWSTDILKDQKEPKNKTFLRCEAKNYSGRFTCWWLTTISTDLTFSVKSSRGSSDPQGVTCGAATLSAERVRGDNKEYEYSVECQEDSACPAAEESLPIEVMVDAVHKLKYENYTSSFFIRDIIKPDPPKNLQLKPLKNSRQVEVSWEYPDTWSTPHSYFSLTFCVQVQGKSKREKKDRVFTDKTSATVICRKNASISVRAQDRYYSSSWSEWASVPCS

SEQ ID NO: 2625 - protein, 1267 aa, Artificial Sequence
  synthetic polypeptide
MALPVTALLLPLALLLHAARPQVQLVQSGAEVKKPGASVKVSCKASGYTFTNYGMNWVRQAPGQGLKWMGWINTYTGEPTYADAFKGRVTMTRDTSISTAYMELSRLRSDDTAVYYCARDYGDYGMDYWGQGTTVTVSSGGGGSGGGGSGGGGSGDIVMTQSPDSLAVSLGERATINCRASKSVSTSGYSFMHWYQQKPGQPPKLLIYLASNLESGVPDRFSGSGSGTDFTLTISSLQAEDVAVYYCQHSREVPWTFGQGTKVEIKEPKSCDKTHTCPPCPAPELLGGPSVFLFPPKPKDTLMISRTPEVTCVVVDVSHEDPEVKFNWYVDGVEVHNAKTKPREEQYNSTYRVVSVLTVLHQDWLNGKEYKCKVSNKALPAPIEKTISKAKGQPREPQVYTLPPSRDELTKNQVSLTCLVKGFYPSDIAVEWESNGQPENNYKTTPPVLDSDGSFFLYSKLTVDKSRWQQGNVFSCSVMHEALHNHYTQKSLSLSPGKFWVLVVVGGVLACYSLLVTVAFIIFWVRSKRSRLLHSDYMNMTPRRPGPTRKHYQPYAPPRDFAAYRSRVKFSRSADAPAYQQGQNQLYNELNLGRREEYDVLDKRRGRDPEMGGKPRRKNPQEGLYNELQKDKMAEAYSEIGMKGERRRGKGHDGLYQGLSTATKDTYDALHMQALPPRGSGATNFSLLKQAGDVEENPGPCPARSLLLVATLVLLDHLSLARNLPVATPDPGMFPCLHHSQNLLRAVSNMLQKARQTLEFYPCTSEEIDHEDITKDKTSTVEACLPLELTKNESCLNSRETSFITNGSCLASRKTSFMMALCLSSIYEDLKMYQVEFKTMNAKLLMDPKRQIFLDQNMLAVIDELMQALNFNSETVPQKSSLEEPDFYKTKIKLCILLHAFRIRAVTIDRVMSYLNASGSGATNFSLLKQAGDVEENPGPCHQQLVISWFSLVFLASPLVAIWELKKDVYVVELDWYPDAPGEMVVLTCDTPEEDGITWTLDQSSEVLGSGKTLTIQVKEFGDAGQYTCHKGGEVLSHSLLLLHKKEDGIWSTDILKDQKEPKNKTFLRCEAKNYSGRFTCWWLTTISTDLTFSVKSSRGSSDPQGVTCGAATLSAERVRGDNKEYEYSVECQEDSACPAAEESLPIEVMVDAVHKLKYENYTSSFFIRDIIKPDPPKNLQLKPLKNSRQVEVSWEYPDTWSTPHSYFSLTFCVQVQGKSKREKKDRVFTDKTSATVICRKNASISVRAQDRYYSSSWSEWASVPCS

SEQ ID NO: 2626 - protein, 1091 aa, Artificial Sequence
  synthetic polypeptide
MALPVTALLLPLALLLHAARPQVQLVQSGAEVKKPGASVKVSCKASGYTFTNYGMNWVRQAPGQGLKWMGWINTYTGEPTYADAFKGRVTMTRDTSISTAYMELSRLRSDDTAVYYCARDYGDYGMDYWGQGTTVTVSSGGGGSGGGGSGGGGSGDIVMTQSPDSLAVSLGERATINCRASKSVSTSGYSFMHWYQQKPGQPPKLLIYLASNLESGVPDRFSGSGSGTDFTLTISSLQAEDVAVYYCQHSREVPWTFGQGTKVEIKFVPVFLPAKPTTTPAPRPPTPAPTIASQPLSLRPEACRPAAGGAVHTRGLDFACDIYIWAPLAGTCGVLLLSLVITLYCNHRNRSKRSRLLHSDYMNMTPRRPGPTRKHYQPYAPPRDFAAYRSRVKFSRSADAPAYQQGQNQLYNELNLGRREEYDVLDKRRGRDPEMGGKPRRKNPQEGLYNELQKDKMAEAYSEIGMKGERRRGKGHDGLYQGLSTATKDTYDALHMQALPPRGSGATNFSLLKQAGDVEENPGPCPARSLLLVATLVLLDHLSLARNLPVATPDPGMFPCLHHSQNLLRAVSNMLQKARQTLEFYPCTSEEIDHEDITKDKTSTVEACLPLELTKNESCLNSRETSFITNGSCLASRKTSFMMALCLSSIYEDLKMYQVEFKTMNAKLLMDPKRQIFLDQNMLAVIDELMQALNFNSETVPQKSSLEEPDFYKTKIKLCILLHAFRIRAVTIDRVMSYLNASGSGATNFSLLKQAGDVEENPGPCHQQLVISWFSLVFLASPLVAIWELKKDVYVVELDWYPDAPGEMVVLTCDTPEEDGITWTLDQSSEVLGSGKTLTIQVKEFGDAGQYTCHKGGEVLSHSLLLLHKKEDGIWSTDILKDQKEPKNKTFLRCEAKNYSGRFTCWWLTTISTDLTFSVKSSRGSSDPQGVTCGAATLSAERVRGDNKEYEYSVECQEDSACPAAEESLPIEVMVDAVHKLKYENYTSSFFIRDIIKPDPPKNLQLKPLKNSRQVEVSWEYPDTWSTPHSYFSLTFCVQVQGKSKREKKDRVFTDKTSATVICRKNASISVRAQDRYYSSSWSEWASVPCS

SEQ ID NO: 2627 - protein, 592 aa, Artificial Sequence
  synthetic polypeptide
MARPHPWWLCVLGTLVGLSATPAPKSCPERHYWAQGKLCCQMCEPGTFLVKDCDQHRKAAQCDPCIPGVSFSPDHHTRPHCESCRHCNSGLLVRNCTITANAECACRNGWQCRDKECTECDPLPNPSLTARSSQALSPHPQPTHLPYVSEMLEARTAGHMQTLADFRQLPARTLSTHWPPQRSLCSSDFIRILVIFSGMFLVFTLAGALFLHQRRKYRSNKGESPVEPAEPCHYSCPREEEGSTIPIQEDYRKPEPACSPRVKFSRSADAPAYQQGQNQLYNELNLGRREEYDVLDKRRGRDPEMGGKPRRKNPQEGLYNELQKDKMAEAYSEIGMKGERRRGKGHDGLYQGLSTATKDTYDALHMQALPPRGSGATNFSLLKQAGDVEENPGPGRGLLRGLWPLHIVLWTRIASTIPPHVQKSVNNDMIVTDNNGAVKFPQLCKFCDVRFSTCDNQKSCMSNCSITSICEKPQEVCVAVWRKNDENITLETVCHDPKLPYHDFILEDAASPKCIMKEKKKPGETFFMCSCSSDECNDNIIFSEEYNTSNPDLLLVIFQVTGISLLPPLGVAISVIIIFYCYRVNRQQKLSS

SEQ ID NO: 2628 - protein, 586 aa, Artificial Sequence
  synthetic polypeptide
MARPHPWWLCVLGTLVGLSATPAPKSCPERHYWAQGKLCCQMCEPGTFLVKDCDQHRKAAQCDPCIPGVSFSPDHHTRPHCESCRHCNSGLLVRNCTITANAECACRNGWQCRDKECTECDPLPNPSLTARSSQALSPHPQPTHLPYVSEMLEARTAGHMQTLADFRQLPARTLSTHWPPQRSLCSSDFIRILVIFSGMFLVFTLAGALFLRKRGRKKLLYIFKQPFMRPVQTTQEEDGCSCRFPEEEEGGCELRVKFSRSADAPAYQQGQNQLYNELNLGRREEYDVLDKRRGRDPEMGGKPRRKNPQEGLYNELQKDKMAEAYSEIGMKGERRRGKGHDGLYQGLSTATKDTYDALHMQALPPRGSGATNFSLLKQAGDVEENPGPGRGLLRGLWPLHIVLWTRIASTIPPHVQKSVNNDMIVTDNNGAVKFPQLCKFCDVRFSTCDNQKSCMSNCSITSICEKPQEVCVAVWRKNDENITLETVCHDPKLPYHDFILEDAASPKCIMKEKKKPGETFFMCSCSSDECNDNIIFSEEYNTSNPDLLLVIFQVTGISLLPPLGVAISVIIIFYCYRVNRQQKLSS

SEQ ID NO: 2629 - protein, 722 aa, Artificial Sequence
  synthetic polypeptide
MALPVTALLLPLALLLHAARPQVQLVQSGAEVKKPGASVKVSCKASGYTFTNYGMNWVRQAPGQGLKWMGWINTYTGEPTYADAFKGRVTMTRDTSISTAYMELSRLRSDDTAVYYCARDYGDYGMDYWGQGTTVTVSSGGGGSGGGGSGGGGSGDIVMTQSPDSLAVSLGERATINCRASKSVSTSGYSFMHWYQQKPGQPPKLLIYLASNLESGVPDRFSGSGSGTDFTLTISSLQAEDVAVYYCQHSREVPWTFGQGTKVEIKFVPVFLPAKPTTTPAPRPPTPAPTIASQPLSLRPEACRPAAGGAVHTRGLDFACDIYIWAPLAGTCGVLLLSLVITLYCNHRNRSKRSRLLHSDYMNMTPRRPGPTRKHYQPYAPPRDFAAYRSRVKFSRSADAPAYQQGQNQLYNELNLGRREEYDVLDKRRGRDPEMGGKPRRKNPQEGLYNELQKDKMAEAYSEIGMKGERRRGKGHDGLYQGLSTATKDTYDALHMQALPPRGSGATNFSLLKQAGDVEENPGPGRGLLRGLWPLHIVLWTRIASTIPPHVQKSVNNDMIVTDNNGAVKFPQLCKFCDVRFSTCDNQKSCMSNCSITSICEKPQEVCVAVWRKNDENITLETVCHDPKLPYHDFILEDAASPKCIMKEKKKPGETFFMCSCSSDECNDNIIFSEEYNTSNPDLLLVIFQVTGISLLPPLGVAISVIIIFYCYRVNRQQKLSS

SEQ ID NO: 2630 - protein, 724 aa, Artificial Sequence
  synthetic polypeptide
MALPVTALLLPLALLLHAARPQVQLVQSGAEVKKPGASVKVSCKASGYTFTNYGMNWVRQAPGQGLKWMGWINTYTGEPTYADAFKGRVTMTRDTSISTAYMELSRLRSDDTAVYYCARDYGDYGMDYWGQGTTVTVSSGGGGSGGGGSGGGGSGDIVMTQSPDSLAVSLGERATINCRASKSVSTSGYSFMHWYQQKPGQPPKLLIYLASNLESGVPDRFSGSGSGTDFTLTISSLQAEDVAVYYCQHSREVPWTFGQGTKVEIKFVPVFLPAKPTTTPAPRPPTPAPTIASQPLSLRPEACRPAAGGAVHTRGLDFACDIYIWAPLAGTCGVLLLSLVITLYCNHRNRKRGRKKLLYIFKQPFMRPVQTTQEEDGCSCRFPEEEEGGCELRVKFSRSADAPAYQQGQNQLYNELNLGRREEYDVLDKRRGRDPEMGGKPRRKNPQEGLYNELQKDKMAEAYSEIGMKGERRRGKGHDGLYQGLSTATKDTYDALHMQALPPRGSGATNFSLLKQAGDVEENPGPGRGLLRGLWPLHIVLWTRIASTIPPHVQKSVNNDMIVTDNNGAVKFPQLCKFCDVRFSTCDNQKSCMSNCSITSICEKPQEVCVAVWRKNDENITLETVCHDPKLPYHDFILEDAASPKCIMKEKKKPGETFFMCSCSSDECNDNIIFSEEYNTSNPDLLLVIFQVTGISLLPPLGVAISVIIIFYCYRVNRQQKLSS

SEQ ID NO: 2631 - protein, 898 aa, Artificial Sequence
  synthetic polypeptide
MALPVTALLLPLALLLHAARPQVQLVQSGAEVKKPGASVKVSCKASGYTFTNYGMNWVRQAPGQGLKWMGWINTYTGEPTYADAFKGRVTMTRDTSISTAYMELSRLRSDDTAVYYCARDYGDYGMDYWGQGTTVTVSSGGGGSGGGGSGGGGSGDIVMTQSPDSLAVSLGERATINCRASKSVSTSGYSFMHWYQQKPGQPPKLLIYLASNLESGVPDRFSGSGSGTDFTLTISSLQAEDVAVYYCQHSREVPWTFGQGTKVEIKEPKSCDKTHTCPPCPAPELLGGPSVFLFPPKPKDTLMISRTPEVTCVVVDVSHEDPEVKFNWYVDGVEVHNAKTKPREEQYNSTYRVVSVLTVLHQDWLNGKEYKCKVSNKALPAPIEKTISKAKGQPREPQVYTLPPSRDELTKNQVSLTCLVKGFYPSDIAVEWESNGQPENNYKTTPPVLDSDGSFFLYSKLTVDKSRWQQGNVFSCSVMHEALHNHYTQKSLSLSPGKFWVLVVVGGVLACYSLLVTVAFIIFWVRSKRSRLLHSDYMNMTPRRPGPTRKHYQPYAPPRDFAAYRSRVKFSRSADAPAYQQGQNQLYNELNLGRREEYDVLDKRRGRDPEMGGKPRRKNPQEGLYNELQKDKMAEAYSEIGMKGERRRGKGHDGLYQGLSTATKDTYDALHMQALPPRGSGATNFSLLKQAGDVEENPGPGRGLLRGLWPLHIVLWTRIASTIPPHVQKSVNNDMIVTDNNGAVKFPQLCKFCDVRFSTCDNQKSCMSNCSITSICEKPQEVCVAVWRKNDENITLETVCHDPKLPYHDFILEDAASPKCIMKEKKKPGETFFMCSCSSDECNDNIIFSEEYNTSNPDLLLVIFQVTGISLLPPLGVAISVIIIFYCYRVNRQQKLSS

SEQ ID NO: 2632 - protein, 775 aa, Artificial Sequence
  synthetic polypeptide
MARPHPWWLCVLGTLVGLSATPAPKSCPERHYWAQGKLCCQMCEPGTFLVKDCDQHRKAAQCDPCIPGVSFSPDHHTRPHCESCRHCNSGLLVRNCTITANAECACRNGWQCRDKECTECDPLPNPSLTARSSQALSPHPQPTHLPYVSEMLEARTAGHMQTLADFRQLPARTLSTHWPPQRSLCSSDFIRILVIFSGMFLVFTLAGALFLHQRRKYRSNKGESPVEPAEPCHYSCPREEEGSTIPIQEDYRKPEPACSPRVKFSRSADAPAYQQGQNQLYNELNLGRREEYDVLDKRRGRDPEMGGKPRRKNPQEGLYNELQKDKMAEAYSEIGMKGERRRGKGHDGLYQGLSTATKDTYDALHMQALPPRGSGATNFSLLKQAGDVEENPGPGRGLLRGLWPLHIVLWTRIASTIPPHVQKSVNNDMIVTDNNGAVKFPQLCKFCDVRFSTCDNQKSCMSNCSITSICEKPQEVCVAVWRKNDENITLETVCHDPKLPYHDFILEDAASPKCIMKEKKKPGETFFMCSCSSDECNDNIIFSEEYNTSNPDLLLVIFQVTGISLLPPLGVAISVIIIFYCYRVNRQQKLSSGSGATNFSLLKQAGDVEENPGPRISKPHLRSISIQCYLCLLLNSHFLTEAGIHVFILGCFSAGLPKTEANWVNVISDLKKIEDLIQSMHIDATLYTESDVHPSCKVTAMKCFLLELQVISLESGDASIHDTVENLIILANNSLSSNGNVTESGCKECEELEEKNIKEFLQSFVHIVQMFINTS

SEQ ID NO: 2633 - protein, 769 aa, Artificial Sequence
  synthetic polypeptide
MARPHPWWLCVLGTLVGLSATPAPKSCPERHYWAQGKLCCQMCEPGTFLVKDCDQHRKAAQCDPCIPGVSFSPDHHTRPHCESCRHCNSGLLVRNCTITANAECACRNGWQCRDKECTECDPLPNPSLTARSSQALSPHPQPTHLPYVSEMLEARTAGHMQTLADFRQLPARTLSTHWPPQRSLCSSDFIRILVIFSGMFLVFTLAGALFLRKRGRKKLLYIFKQPFMRPVQTTQEEDGCSCRFPEEEEGGCELRVKFSRSADAPAYQQGQNQLYNELNLGRREEYDVLDKRRGRDPEMGGKPRRKNPQEGLYNELQKDKMAEAYSEIGMKGERRRGKGHDGLYQGLSTATKDTYDALHMQALPPRGSGATNFSLLKQAGDVEENPGPGRGLLRGLWPLHIVLWTRIASTIPPHVQKSVNNDMIVTDNNGAVKFPQLCKFCDVRFSTCDNQKSCMSNCSITSICEKPQEVCVAVWRKNDENITLETVCHDPKLPYHDFILEDAASPKCIMKEKKKPGETFFMCSCSSDECNDNIIFSEEYNTSNPDLLLVIFQVTGISLLPPLGVAISVIIIFYCYRVNRQQKLSSGSGATNFSLLKQAGDVEENPGPRISKPHLRSISIQCYLCLLLNSHFLTEAGIHVFILGCFSAGLPKTEANWVNVISDLKKIEDLIQSMHIDATLYTESDVHPSCKVTAMKCFLLELQVISLESGDASIHDTVENLIILANNSLSSNGNVTESGCKECEELEEKNIKEFLQSFVHIVQMFINTS

SEQ ID NO: 2634 - protein, 905 aa, Artificial Sequence
  synthetic polypeptide
MALPVTALLLPLALLLHAARPQVQLVQSGAEVKKPGASVKVSCKASGYTFTNYGMNWVRQAPGQGLKWMGWINTYTGEPTYADAFKGRVTMTRDTSISTAYMELSRLRSDDTAVYYCARDYGDYGMDYWGQGTTVTVSSGGGGSGGGGSGGGGSGDIVMTQSPDSLAVSLGERATINCRASKSVSTSGYSFMHWYQQKPGQPPKLLIYLASNLESGVPDRFSGSGSGTDFTLTISSLQAEDVAVYYCQHSREVPWTFGQGTKVEIKFVPVFLPAKPTTTPAPRPPTPAPTIASQPLSLRPEACRPAAGGAVHTRGLDFACDIYIWAPLAGTCGVLLLSLVITLYCNHRNRSKRSRLLHSDYMNMTPRRPGPTRKHYQPYAPPRDFAAYRSRVKFSRSADAPAYQQGQNQLYNELNLGRREEYDVLDKRRGRDPEMGGKPRRKNPQEGLYNELQKDKMAEAYSEIGMKGERRRGKGHDGLYQGLSTATKDTYDALHMQALPPRGSGATNFSLLKQAGDVEENPGPGRGLLRGLWPLHIVLWTRIASTIPPHVQKSVNNDMIVTDNNGAVKFPQLCKFCDVRFSTCDNQKSCMSNCSITSICEKPQEVCVAVWRKNDENITLETVCHDPKLPYHDFILEDAASPKCIMKEKKKPGETFFMCSCSSDECNDNIIFSEEYNTSNPDLLLVIFQVTGISLLPPLGVAISVIIIFYCYRVNRQQKLSSGSGATNFSLLKQAGDVEENPGPRISKPHLRSISIQCYLCLLLNSHFLTEAGIHVFILGCFSAGLPKTEANWVNVISDLKKIEDLIQSMHIDATLYTESDVHPSCKVTAMKCFLLELQVISLESGDASIHDTVENLIILANNSLSSNGNVTESGCKECEELEEKNIKEFLQSFVHIVQMFINTS

SEQ ID NO: 2635 - protein, 907 aa, Artificial Sequence
  synthetic polypeptide
MALPVTALLLPLALLLHAARPQVQLVQSGAEVKKPGASVKVSCKASGYTFTNYGMNWVRQAPGQGLKWMGWINTYTGEPTYADAFKGRVTMTRDTSISTAYMELSRLRSDDTAVYYCARDYGDYGMDYWGQGTTVTVSSGGGGSGGGGSGGGGSGDIVMTQSPDSLAVSLGERATINCRASKSVSTSGYSFMHWYQQKPGQPPKLLIYLASNLESGVPDRFSGSGSGTDFTLTISSLQAEDVAVYYCQHSREVPWTFGQGTKVEIKFVPVFLPAKPTTTPAPRPPTPAPTIASQPLSLRPEACRPAAGGAVHTRGLDFACDIYIWAPLAGTCGVLLLSLVITLYCNHRNRKRGRKKLLYIFKQPFMRPVQTTQEEDGCSCRFPEEEEGGCELRVKFSRSADAPAYQQGQNQLYNELNLGRREEYDVLDKRRGRDPEMGGKPRRKNPQEGLYNELQKDKMAEAYSEIGMKGERRRGKGHDGLYQGLSTATKDTYDALHMQALPPRGSGATNFSLLKQAGDVEENPGPGRGLLRGLWPLHIVLWTRIASTIPPHVQKSVNNDMIVTDNNGAVKFPQLCKFCDVRFSTCDNQKSCMSNCSITSICEKPQEVCVAVWRKNDENITLETVCHDPKLPYHDFILEDAASPKCIMKEKKKPGETFFMCSCSSDECNDNIIFSEEYNTSNPDLLLVIFQVTGISLLPPLGVAISVIIIFYCYRVNRQQKLSSGSGATNFSLLKQAGDVEENPGPRISKPHLRSISIQCYLCLLLNSHFLTEAGIHVFILGCFSAGLPKTEANWVNVISDLKKIEDLIQSMHIDATLYTESDVHPSCKVTAMKCFLLELQVISLESGDASIHDTVENLIILANNSLSSNGNVTESGCKECEELEEKNIKEFLQSFVHIVQMFINTS

SEQ ID NO: 2636 - protein, 1081 aa, Artificial Sequence
  synthetic polypeptide
MALPVTALLLPLALLLHAARPQVQLVQSGAEVKKPGASVKVSCKASGYTFTNYGMNWVRQAPGQGLKWMGWINTYTGEPTYADAFKGRVTMTRDTSISTAYMELSRLRSDDTAVYYCARDYGDYGMDYWGQGTTVTVSSGGGGSGGGGSGGGGSGDIVMTQSPDSLAVSLGERATINCRASKSVSTSGYSFMHWYQQKPGQPPKLLIYLASNLESGVPDRFSGSGSGTDFTLTISSLQAEDVAVYYCQHSREVPWTFGQGTKVEIKEPKSCDKTHTCPPCPAPELLGGPSVFLFPPKPKDTLMISRTPEVTCVVVDVSHEDPEVKFNWYVDGVEVHNAKTKPREEQYNSTYRVVSVLTVLHQDWLNGKEYKCKVSNKALPAPIEKTISKAKGQPREPQVYTLPPSRDELTKNQVSLTCLVKGFYPSDIAVEWESNGQPENNYKTTPPVLDSDGSFFLYSKLTVDKSRWQQGNVFSCSVMHEALHNHYTQKSLSLSPGKFWVLVVVGGVLACYSLLVTVAFIIFWVRSKRSRLLHSDYMNMTPRRPGPTRKHYQPYAPPRDFAAYRSRVKFSRSADAPAYQQGQNQLYNELNLGRREEYDVLDKRRGRDPEMGGKPRRKNPQEGLYNELQKDKMAEAYSEIGMKGERRRGKGHDGLYQGLSTATKDTYDALHMQALPPRGSGATNFSLLKQAGDVEENPGPGRGLLRGLWPLHIVLWTRIASTIPPHVQKSVNNDMIVTDNNGAVKFPQLCKFCDVRFSTCDNQKSCMSNCSITSICEKPQEVCVAVWRKNDENITLETVCHDPKLPYHDFILEDAASPKCIMKEKKKPGETFFMCSCSSDECNDNIIFSEEYNTSNPDLLLVIFQVTGISLLPPLGVAISVIIIFYCYRVNRQQKLSSGSGATNFSLLKQAGDVEENPGPRISKPHLRSISIQCYLCLLLNSHFLTEAGIHVFILGCFSAGLPKTEANWVNVISDLKKIEDLIQSMHIDATLYTESDVHPSCKVTAMKCFLLELQVISLESGDASIHDTVENLIILANNSLSSNGNVTESGCKECEELEEKNIKEFLQSFVHIVQMFINTS

SEQ ID NO: 2637 - protein, 1063 aa, Artificial Sequence
  synthetic polypeptide
MARPHPWWLCVLGTLVGLSATPAPKSCPERHYWAQGKLCCQMCEPGTFLVKDCDQHRKAAQCDPCIPGVSFSPDHHTRPHCESCRHCNSGLLVRNCTITANAECACRNGWQCRDKECTECDPLPNPSLTARSSQALSPHPQPTHLPYVSEMLEARTAGHMQTLADFRQLPARTLSTHWPPQRSLCSSDFIRILVIFSGMFLVFTLAGALFLHQRRKYRSNKGESPVEPAEPCHYSCPREEEGSTIPIQEDYRKPEPACSPRVKFSRSADAPAYQQGQNQLYNELNLGRREEYDVLDKRRGRDPEMGGKPRRKNPQEGLYNELQKDKMAEAYSEIGMKGERRRGKGHDGLYQGLSTATKDTYDALHMQALPPRGSGATNFSLLKQAGDVEENPGPGRGLLRGLWPLHIVLWTRIASTIPPHVQKSVNNDMIVTDNNGAVKFPQLCKFCDVRFSTCDNQKSCMSNCSITSICEKPQEVCVAVWRKNDENITLETVCHDPKLPYHDFILEDAASPKCIMKEKKKPGETFFMCSCSSDECNDNIIFSEEYNTSNPDLLLVIFQVTGISLLPPLGVAISVIIIFYCYRVNRQQKLSSGSGATNFSLLKQAGDVEENPGPAPRRARGCRTLGLPALLLLLLLRPPATRGITCPPPMSVEHADIWVKSYSLYSRERYICNSGFKRKAGTSSLTECVLNKATNVAHWTTPSLKCIRDPALVHQRPAPPSTVTTAGVTPQPESLSPSGKEPAASSPSSNNTAATTAAIVPGSQLMPSKSPSTGTTEISSHESSHGTPSQTTAKNWELTASASHQPPGVYPQGHSDTTVAISTSTVLLCGLSAVSLLACYLKSRQTPPLASVEMEAMEALPVTWGTSSRDEDLENCSHHLGSGATNFSLLKQAGDVEENPGPRISKPHLRSISIQCYLCLLLNSHFLTEAGIHVFILGCFSAGLPKTEANWVNVISDLKKIEDLIQSMHIDATLYTESDVHPSCKVTAMKCFLLELQVISLESGDASIHDTVENLIILANNSLSSNGNVTESGCKECEELEEKNIKEFLQSFVHIVQMFINTS

SEQ ID NO: 2638 - protein, 1057 aa, Artificial Sequence
  synthetic polypeptide
MARPHPWWLCVLGTLVGLSATPAPKSCPERHYWAQGKLCCQMCEPGTFLVKDCDQHRKAAQCDPCIPGVSFSPDHHTRPHCESCRHCNSGLLVRNCTITANAECACRNGWQCRDKECTECDPLPNPSLTARSSQALSPHPQPTHLPYVSEMLEARTAGHMQTLADFRQLPARTLSTHWPPQRSLCSSDFIRILVIFSGMFLVFTLAGALFLRKRGRKKLLYIFKQPFMRPVQTTQEEDGCSCRFPEEEEGGCELRVKFSRSADAPAYQQGQNQLYNELNLGRREEYDVLDKRRGRDPEMGGKPRRKNPQEGLYNELQKDKMAEAYSEIGMKGERRRGKGHDGLYQGLSTATKDTYDALHMQALPPRGSGATNFSLLKQAGDVEENPGPGRGLLRGLWPLHIVLWTRIASTIPPHVQKSVNNDMIVTDNNGAVKFPQLCKFCDVRFSTCDNQKSCMSNCSITSICEKPQEVCVAVWRKNDENITLETVCHDPKLPYHDFILEDAASPKCIMKEKKKPGETFFMCSCSSDECNDNIIFSEEYNTSNPDLLLVIFQVTGISLLPPLGVAISVIIIFYCYRVNRQQKLSSGSGATNFSLLKQAGDVEENPGPAPRRARGCRTLGLPALLLLLLLRPPATRGITCPPPMSVEHADIWVKSYSLYSRERYICNSGFKRKAGTSSLTECVLNKATNVAHWTTPSLKCIRDPALVHQRPAPPSTVTTAGVTPQPESLSPSGKEPAASSPSSNNTAATTAAIVPGSQLMPSKSPSTGTTEISSHESSHGTPSQTTAKNWELTASASHQPPGVYPQGHSDTTVAISTSTVLLCGLSAVSLLACYLKSRQTPPLASVEMEAMEALPVTWGTSSRDEDLENCSHHLGSGATNFSLLKQAGDVEENPGPRISKPHLRSISIQCYLCLLLNSHFLTEAGIHVFILGCFSAGLPKTEANWVNVISDLKKIEDLIQSMHIDATLYTESDVHPSCKVTAMKCFLLELQVISLESGDASIHDTVENLIILANNSLSSNGNVTESGCKECEELEEKNIKEFLQSFVHIVQMFINTS

SEQ ID NO: 2639 - protein, 1193 aa, Artificial Sequence
  synthetic polypeptide
MALPVTALLLPLALLLHAARPQVQLVQSGAEVKKPGASVKVSCKASGYTFTNYGMNWVRQAPGQGLKWMGWINTYTGEPTYADAFKGRVTMTRDTSISTAYMELSRLRSDDTAVYYCARDYGDYGMDYWGQGTTVTVSSGGGGSGGGGSGGGGSGDIVMTQSPDSLAVSLGERATINCRASKSVSTSGYSFMHWYQQKPGQPPKLLIYLASNLESGVPDRFSGSGSGTDFTLTISSLQAEDVAVYYCQHSREVPWTFGQGTKVEIKFVPVFLPAKPTTTPAPRPPTPAPTIASQPLSLRPEACRPAAGGAVHTRGLDFACDIYIWAPLAGTCGVLLLSLVITLYCNHRNRSKRSRLLHSDYMNMTPRRPGPTRKHYQPYAPPRDFAAYRSRVKFSRSADAPAYQQGQNQLYNELNLGRREEYDVLDKRRGRDPEMGGKPRRKNPQEGLYNELQKDKMAEAYSEIGMKGERRRGKGHDGLYQGLSTATKDTYDALHMQALPPRGSGATNFSLLKQAGDVEENPGPGRGLLRGLWPLHIVLWTRIASTIPPHVQKSVNNDMIVTDNNGAVKFPQLCKFCDVRFSTCDNQKSCMSNCSITSICEKPQEVCVAVWRKNDENITLETVCHDPKLPYHDFILEDAASPKCIMKEKKKPGETFFMCSCSSDECNDNIIFSEEYNTSNPDLLLVIFQVTGISLLPPLGVAISVIIIFYCYRVNRQQKLSSGSGATNFSLLKQAGDVEENPGPAPRRARGCRTLGLPALLLLLLLRPPATRGITCPPPMSVEHADIWVKSYSLYSRERYICNSGFKRKAGTSSLTECVLNKATNVAHWTTPSLKCIRDPALVHQRPAPPSTVTTAGVTPQPESLSPSGKEPAASSPSSNNTAATTAAIVPGSQLMPSKSPSTGTTEISSHESSHGTPSQTTAKNWELTASASHQPPGVYPQGHSDTTVAISTSTVLLCGLSAVSLLACYLKSRQTPPLASVEMEAMEALPVTWGTSSRDEDLENCSHHLGSGATNFSLLKQAGDVEENPGPRISKPHLRSISIQCYLCLLLNSHFLTEAGIHVFILGCFSAGLPKTEANWVNVISDLKKIEDLIQSMHIDATLYTESDVHPSCKVTAMKCFLLELQVISLESGDASIHDTVENLIILANNSLSSNGNVTESGCKECEELEEKNIKEFLQSFVHIVQMFINTS

SEQ ID NO: 2640 - protein, 1195 aa, Artificial Sequence
  synthetic polypeptide
MALPVTALLLPLALLLHAARPQVQLVQSGAEVKKPGASVKVSCKASGYTFTNYGMNWVRQAPGQGLKWMGWINTYTGEPTYADAFKGRVTMTRDTSISTAYMELSRLRSDDTAVYYCARDYGDYGMDYWGQGTTVTVSSGGGGSGGGGSGGGGSGDIVMTQSPDSLAVSLGERATINCRASKSVSTSGYSFMHWYQQKPGQPPKLLIYLASNLESGVPDRFSGSGSGTDFTLTISSLQAEDVAVYYCQHSREVPWTFGQGTKVEIKFVPVFLPAKPTTTPAPRPPTPAPTIASQPLSLRPEACRPAAGGAVHTRGLDFACDIYIWAPLAGTCGVLLLSLVITLYCNHRNRKRGRKKLLYIFKQPFMRPVQTTQEEDGCSCRFPEEEEGGCELRVKFSRSADAPAYQQGQNQLYNELNLGRREEYDVLDKRRGRDPEMGGKPRRKNPQEGLYNELQKDKMAEAYSEIGMKGERRRGKGHDGLYQGLSTATKDTYDALHMQALPPRGSGATNFSLLKQAGDVEENPGPGRGLLRGLWPLHIVLWTRIASTIPPHVQKSVNNDMIVTDNNGAVKFPQLCKFCDVRFSTCDNQKSCMSNCSITSICEKPQEVCVAVWRKNDENITLETVCHDPKLPYHDFILEDAASPKCIMKEKKKPGETFFMCSCSSDECNDNIIFSEEYNTSNPDLLLVIFQVTGISLLPPLGVAISVIIIFYCYRVNRQQKLSSGSGATNFSLLKQAGDVEENPGPAPRRARGCRTLGLPALLLLLLLRPPATRGITCPPPMSVEHADIWVKSYSLYSRERYICNSGFKRKAGTSSLTECVLNKATNVAHWTTPSLKCIRDPALVHQRPAPPSTVTTAGVTPQPESLSPSGKEPAASSPSSNNTAATTAAIVPGSQLMPSKSPSTGTTEISSHESSHGTPSQTTAKNWELTASASHQPPGVYPQGHSDTTVAISTSTVLLCGLSAVSLLACYLKSRQTPPLASVEMEAMEALPVTWGTSSRDEDLENCSHHLGSGATNFSLLKQAGDVEENPGPRISKPHLRSISIQCYLCLLLNSHFLTEAGIHVFILGCFSAGLPKTEANWVNVISDLKKIEDLIQSMHIDATLYTESDVHPSCKVTAMKCFLLELQVISLESGDASIHDTVENLIILANNSLSSNGNVTESGCKECEELEEKNIKEFLQSFVHIVQMFINTS

SEQ ID NO: 2641 - protein, 1369 aa, Artificial Sequence
  synthetic polypeptide
MALPVTALLLPLALLLHAARPQVQLVQSGAEVKKPGASVKVSCKASGYTFTNYGMNWVRQAPGQGLKWMGWINTYTGEPTYADAFKGRVTMTRDTSISTAYMELSRLRSDDTAVYYCARDYGDYGMDYWGQGTTVTVSSGGGGSGGGGSGGGGSGDIVMTQSPDSLAVSLGERATINCRASKSVSTSGYSFMHWYQQKPGQPPKLLIYLASNLESGVPDRFSGSGSGTDFTLTISSLQAEDVAVYYCQHSREVPWTFGQGTKVEIKEPKSCDKTHTCPPCPAPELLGGPSVFLFPPKPKDTLMISRTPEVTCVVVDVSHEDPEVKFNWYVDGVEVHNAKTKPREEQYNSTYRVVSVLTVLHQDWLNGKEYKCKVSNKALPAPIEKTISKAKGQPREPQVYTLPPSRDELTKNQVSLTCLVKGFYPSDIAVEWESNGQPENNYKTTPPVLDSDGSFFLYSKLTVDKSRWQQGNVFSCSVMHEALHNHYTQKSLSLSPGKFWVLVVVGGVLACYSLLVTVAFIIFWVRSKRSRLLHSDYMNMTPRRPGPTRKHYQPYAPPRDFAAYRSRVKFSRSADAPAYQQGQNQLYNELNLGRREEYDVLDKRRGRDPEMGGKPRRKNPQEGLYNELQKDKMAEAYSEIGMKGERRRGKGHDGLYQGLSTATKDTYDALHMQALPPRGSGATNFSLLKQAGDVEENPGPGRGLLRGLWPLHIVLWTRIASTIPPHVQKSVNNDMIVTDNNGAVKFPQLCKFCDVRFSTCDNQKSCMSNCSITSICEKPQEVCVAVWRKNDENITLETVCHDPKLPYHDFILEDAASPKCIMKEKKKPGETFFMCSCSSDECNDNIIFSEEYNTSNPDLLLVIFQVTGISLLPPLGVAISVIIIFYCYRVNRQQKLSSGSGATNFSLLKQAGDVEENPGPAPRRARGCRTLGLPALLLLLLLRPPATRGITCPPPMSVEHADIWVKSYSLYSRERYICNSGFKRKAGTSSLTECVLNKATNVAHWTTPSLKCIRDPALVHQRPAPPSTVTTAGVTPQPESLSPSGKEPAASSPSSNNTAATTAAIVPGSQLMPSKSPSTGTTEISSHESSHGTPSQTTAKNWELTASASHQPPGVYPQGHSDTTVAISTSTVLLCGLSAVSLLACYLKSRQTPPLASVEMEAMEALPVTWGTSSRDEDLENCSHHLGSGATNFSLLKQAGDVEENPGPRISKPHLRSISIQCYLCLLLNSHFLTEAGIHVFILGCFSAGLPKTEANWVNVISDLKKIEDLIQSMHIDATLYTESDVHPSCKVTAMKCFLLELQVISLESGDASIHDTVENLIILANNSLSSNGNVTESGCKECEELEEKNIKEFLQSFVHIVQMFINTS

SEQ ID NO: 2642 - protein, 77 aa, Artificial Sequence
  synthetic polypeptide
CRKKRISANSTDPVKAAQFEPPGRQMIAIRKRQLEETNNDYETADGGYMTLNPRAPTDDDKNIYLTLPPNDHVNSNN

SEQ ID NO: 2643 - protein, 26 aa, Homo sapiens
GGGGSGGGGSGGGGSGGGGSAEKDEL

SEQ ID NO: 2644 - protein, 17 aa, Artificial Sequence
  synthetic polypeptide
LYKYKSRRSFIEEKKMP

SEQ ID NO: 2645 - protein, 292 aa, Artificial Sequence
  synthetic polypeptide
MALPVTALLLPLALLLHAARPQVQLVQSGAEVKKPGASVKVSCKASGYTFTNYGMNWVRQAPGQGLKWMGWINTYTGEPTYADAFKGRVTMTRDTSISTAYMELSRLRSDDTAVYYCARDYGDYGMDYWGQGTTVTVSSGGGGSGGGGSGGGGSGDIVMTQSPDSLAVSLGERATINCRASKSVSTSGYSFMHWYQQKPGQPPKLLIYLASNLESGVPDRFSGSGSGTDFTLTISSLQAEDVAVYYCQHSREVPWTFGQGTKVEIKGGGGSGGGGSGGGGSGGGGSAEKDEL

SEQ ID NO: 2646 - protein, 351 aa, Artificial Sequence
  synthetic polypeptide
MALPVTALLLPLALLLHAARPQVQLVQSGAEVKKPGASVKVSCKASGYTFTNYGMNWVRQAPGQGLKWMGWINTYTGEPTYADAFKGRVTMTRDTSISTAYMELSRLRSDDTAVYYCARDYGDYGMDYWGQGTTVTVSSGGGGSGGGGSGGGGSGDIVMTQSPDSLAVSLGERATINCRASKSVSTSGYSFMHWYQQKPGQPPKLLIYLASNLESGVPDRFSGSGSGTDFTLTISSLQAEDVAVYYCQHSREVPWTFGQGTKVEIKKPTTTPAPRPPTPAPTIASQPLSLRPEACRPAAGGAVHTRGLDFACDIYIWAPLAGTCGVLLLSLVITLYKYKSRRSFIEEKKMP

SEQ ID NO: 2647 - DNA, 19 bp, Artificial Sequence
  CD70-shRNA1
gaaacactgatgagacctt

SEQ ID NO: 2648 - DNA, 21 bp, Artificial Sequence
  CD70-shRNA2
ccatcgtgatggcatctacat

SEQ ID NO: 2649 - DNA, 21 bp, Artificial Sequence
  CD70-shRNA3
gtagctgagctgcagctgaat

SEQ ID NO: 2650 - DNA, 21 bp, Artificial Sequence
  CD70-shRNA4
tggcatctacatggtacacat

SEQ ID NO: 2651 - DNA, 21 bp, Artificial Sequence
  CD70-shRNA5
cagctacgtatccatcgtgat

SEQ ID NO: 2652 - DNA, 21 bp, Artificial Sequence
  CD70-shRNA6
acacactctgcaccaacctca

SEQ ID NO: 2653 - DNA, 251 bp, Artificial Sequence
  U6 promoter
gagggcctatttcccatgattccttcatatttgcatatacgatacaaggctgttagagagataattggaattaatttgactgtaaacacaaagatattagtacaaaatacgtgacgtagaaagtaataatttcttgggtagtttgcagttttaaaattatgttttaaaatggactatcatatgcttaccgtaacttgaaagtatttcgatttcttggctttatatatcttgtggaaaggacgaaacaccgg

SEQ ID NO: 2654 - DNA, 6 bp, Artificial Sequence
  loop
ctcgag

SEQ ID NO: 2655 - DNA, 5 bp, Artificial Sequence
  shRNA terminator
ttttt

SEQ ID NO: 2656 - DNA, 300 bp, Artificial Sequence
  U6p-shRNA1
gagggcctatttcccatgattccttcatatttgcatatacgatacaaggctgttagagagataattggaattaatttgactgtaaacacaaagatattagtacaaaatacgtgacgtagaaagtaataatttcttgggtagtttgcagttttaaaattatgttttaaaatggactatcatatgcttaccgtaacttgaaagtatttcgatttcttggctttatatatcttgtggaaaggacgaaacaccgggaaacactgatgagaccttctcgagaaggtctcatcagtgtttcttttt

SEQ ID NO: 2657 - DNA, 304 bp, Artificial Sequence
  U6p-shRNA2
gagggcctatttcccatgattccttcatatttgcatatacgatacaaggctgttagagagataattggaattaatttgactgtaaacacaaagatattagtacaaaatacgtgacgtagaaagtaataatttcttgggtagtttgcagttttaaaattatgttttaaaatggactatcatatgcttaccgtaacttgaaagtatttcgatttcttggctttatatatcttgtggaaaggacgaaacaccggccatcgtgatggcatctacatctcgagatgtagatgccatcacgatggttttt

SEQ ID NO: 2658 - DNA, 304 bp, Artificial Sequence
  U6p-shRNA3
gagggcctatttcccatgattccttcatatttgcatatacgatacaaggctgttagagagataattggaattaatttgactgtaaacacaaagatattagtacaaaatacgtgacgtagaaagtaataatttcttgggtagtttgcagttttaaaattatgttttaaaatggactatcatatgcttaccgtaacttgaaagtatttcgatttcttggctttatatatcttgtggaaaggacgaaacaccgggtagctgagctgcagctgaatctcgagattcagctgcagctcagctacttttt

SEQ ID NO: 2659 - DNA, 304 bp, Artificial Sequence
  U6p-shRNA4
gagggcctatttcccatgattccttcatatttgcatatacgatacaaggctgttagagagataattggaattaatttgactgtaaacacaaagatattagtacaaaatacgtgacgtagaaagtaataatttcttgggtagtttgcagttttaaaattatgttttaaaatggactatcatatgcttaccgtaacttgaaagtatttcgatttcttggctttatatatcttgtggaaaggacgaaacaccggtggcatctacatggtacacatctcgagatgtgtaccatgtagatgccattttt

SEQ ID NO: 2660 - DNA, 304 bp, Artificial Sequence
  U6p-shRNA5
gagggcctatttcccatgattccttcatatttgcatatacgatacaaggctgttagagagataattggaattaatttgactgtaaacacaaagatattagtacaaaatacgtgacgtagaaagtaataatttcttgggtagtttgcagttttaaaattatgttttaaaatggactatcatatgcttaccgtaacttgaaagtatttcgatttcttggctttatatatcttgtggaaaggacgaaacaccggcagctacgtatccatcgtgatctcgagatcacgatggatacgtagctgttttt

SEQ ID NO: 2661 - DNA, 304 bp, Artificial Sequence
  U6p-shRNA6
gagggcctatttcccatgattccttcatatttgcatatacgatacaaggctgttagagagataattggaattaatttgactgtaaacacaaagatattagtacaaaatacgtgacgtagaaagtaataatttcttgggtagtttgcagttttaaaattatgttttaaaatggactatcatatgcttaccgtaacttgaaagtatttcgatttcttggctttatatatcttgtggaaaggacgaaacaccggacacactctgcaccaacctcactcgagtgaggttggtgcagagtgtgtttttt

SEQ ID NO: 2662 - DNA, 458 bp, Artificial Sequence
  IRDR-L-Seq1
cagtgttcttcaacctttgccatccggcggaaccctttgtcgagatatttttttttatggaacccttcatttagtaatacacccagatgagattttagggacagctgcgttgacttgttacgaacaaggtgagcccgtgctttggtctagccaagggcatggtaaagactatattcgcggcgttgtgacaatttaccgaacaactccgcggccgggaagccgatctcggcttgaacgaattgttaggtggcggtacttgggtcgatatcaaagtgcatcacttcttcccgtatgcccaactttgtatagagagccactgcgggatcgtcaccgtaatctgcttgcacgtagatcacataagcaccaagcgcgttggcctcatgcttgaggagattgatgagcgcggtggcaatgccctgcctccggtgctcgccggagactgcgagatcatagatata

SEQ ID NO: 2663 - DNA, 361 bp, Artificial Sequence
  IRDR-R-Seq1
gatatcaagcttatcgataccgtcgacctcgagatttctgaacgattctaggttaggatcaaacaaaatacaatttattttaaaactgtaagttaacttacctttgcttgtctaaaccaaaaacaacaacaaaactacgaccacaagtacagttacatatttttgaaaattaaggttaagtgcagtgtaagtcaactatgcgaatggataacatgtttcaacatgaaactccgattgacgcatgtgcattctgaagagcggcgcggccgacgtctctcgaattgaagcaatgactcgcggaaccccgaaagcctttgggtggaaccctagggttccgcggaacacaggttgaagaacactg

SEQ ID NO: 2664 - DNA, 325 bp, Artificial Sequence
  IRDR-L-Seq2
cctgcaggagtgttcttcaacctttgccatccggcggaaccctttgtcgagatatttttttttatggaacccttcatttagtaatacacccagatgagattttagggacagctgcgttgacttgttacgaacaaggtgagcccgtgctttggtaataaaaactctaaataagatttaaatttgcatttatttaaacaaactttaaacaaaaagataaatattccaaataaaataatatataaaataaaaaataaaaattaatgacttttttgcgcttgcttattattgcacaaattatcaatatcgggatggatcgttgtttttt

SEQ ID NO: 2665 - DNA, 346 bp, Artificial Sequence
  IRDR-R-Seq2
gagccaattcagcatcatatttctgaacgattctaggttaggatcaaacaaaatacaatttattttaaaactgtaagttaacttacctttgcttgtctaaacctaaaacaacaacaaaactacgaccacaagtacagttacatatttttgaaaattaaggttaagtgcagtgtaagtcaactatgcgaatggataacatgtttcaacatgaaactccgattgacgcatgtgcattctgaagagcggcgcggccgacgtctctcgaattgaagcaatgactcgcggaaccccgaaagcctttgggtggaaccctagggttccgcggaacacaggttgaagaacactg

SEQ ID NO: 2666 - DNA, 253 bp, Artificial Sequence
  IRDR-L-Seq3
cagtgttcttcaacctttgccatccggcggaaccctttgtcgagatatttttttttatggaacccttcatttagtaatacacccagatgagattttagggacagctgcgttgacttgttacgaacaaggtgagcccgtgctttggtaataaaaactctaaataagatttaaatttgcatttatttaaacaaactttaaacaaaaagataaatattccaaataaaataatatataaaataaaaaataaaaatta

SEQ ID NO: 2667 - DNA, 328 bp, Artificial Sequence
  IRDR-R-Seq3
atttctgaacgattctaggttaggatcaaacaaaatacaatttattttaaaactgtaagttaacttacctttgcttgtctaaacctaaaacaacaacaaaactacgaccacaagtacagttacatatttttgaaaattaaggttaagtgcagtgtaagtcaactatgcgaatggataacatgtttcaacatgaaactccgattgacgcatgtgcattctgaagagcggcgcggccgacgtctctcgaattgaagcaatgactcgcggaaccccgaaagcctttgggtggaaccctagggttccgcggaacacaggttgaagaacactg

SEQ ID NO: 2668 - DNA, 1482 bp, Artificial Sequence
  NT9385C vector
tacaatggctcatgtggaaaaaccattggcagaaaaacacctgccaacagttttaccacaattgccacttaacccacaaaagggcgctgttatctgataaggcttatctggtctcattttgcacgttgtggtagaattggtaaagagagtcgtgtaaaatatcgagttcgcacatcttgttgtctgattattgatttttggcgaaaccatttgatcatatgacaagatgtgtatctaccttaacttaatgattttgataaaaatcattaggtaccccggctctagttattaatagtaatcaattacggggtcattagttcatagcccatatatggagttccgcgttacataacttacggtaaatggcccgcctggctgaccgcccaacgacccccgcccattgacgtcaataatgacgtatgttcccatagtaacgccaatagggactttccattgacgtcaatgggtggagtatttacggtaaactgcccacttggcagtacatcaagtgtatcatatgccaagtacgccccctattgacgtcaatgacggtaaatggcccgcctggcattatgcccagtacatgaccttatgggactttcctacttggcagtacatctacgtattagtcatcgctattaccatggtgatgcggttttggcagtacatcaatgggcgtggatagcggtttgactcacggggatttccaagtctccaccccattgacgtcaatgggagtttgttttggcaccaaaatcaacgggactttccaaaatgtcgtaacaactccgccccattgacgcaaatgggcggtaggcgtgtacggtgggaggtctatataagcagagctcgtttagtgaaccgtcagatcgcctggagacgccatccacgctgttttgacctccatagaagacaccgggaccgatccagcctccgcggctcgcatctctccttcacgcgcccgccgccctacctgaggccgccatccacgccggttgagtcgcgttctgccgcctcccgcctgtggtgcctcctgaactgcgtccgccgtctaggtaagtttaaagctcaggtcgagaccgggcctttgtccggcgctcccttggagcctacctagactcagccggctctccacgctttgcctgaccctgcttgctcaactctagttctctcgttaacttaatgagacagatagaaactggtcttgtagaaacagagtagtcgcctgcttttctgccaggtgctgacttctctcccctgggcttttttctttttctcaggttgaaaagaagaagacgaagaagacgaagaagacaaaccgtcgtcgacagatctttttccctctgccaaaaattatggggacatcatgaagccccttgagcatctgacttctggctaataaaggaaatttattttcattgcaatagtgtgttggaattttttgtgtctctcactcggaaggacataagggcggccgctagc

SEQ ID NO: 2669 - DNA, 1918 bp, Artificial Sequence
  NT9685C vector
tacaatggctcatgtggaaaaaccattggcagaaaaacacctgccaacagttttaccacaattgccacttaacccacaaaagggcgctgttatctgataaggcttatctggtctcattttgcacgttgtggtagaattggtaaagagagtcgtgtaaaatatcgagttcgcacatcttgttgtctgattattgatttttggcgaaaccatttgatcatatgacaagatgtgtatctaccttaacttaatgattttgataaaaatcattaggtacccctgatcactgtggaatgtgtgtcagttagggtgtggaaagtccccaggctccccagcaggcagaagtatgcaaagcatgcatctcaattagtcagcaaccaggtgtggaaagtccccaggctccccagcaggcagaagtatgcaaagcatgcatctcaattagtcagcaaccatagtcccgcccctaactccgcccatcccgcccctaactccgcccagttacggggtcattagttcatagcccatatatggagttccgcgttacataacttacggtaaatggcccgcctggctgaccgcccaacgacccccgcccattgacgtcaataatgacgtatgttcccatagtaacgccaatagggactttccattgacgtcaatgggtggagtatttacggtaaactgcccacttggcagtacatcaagtgtatcatatgccaagtacgccccctattgacgtcaatgacggtaaatggcccgcctggcattatgcccagtacatgaccttatgggactttcctacttggcagtacatctacgtattagtcatcgctattaccatggtgatgcggttttggcagtacatcaatgggcgtggatagcggtttgactcacggggatttccaagtctccaccccattgacgtcaatgggagtttgttttggcaccaaaatcaacgggactttccaaaatgtcgtaacaactccgccccattgacgcaaatgggcggtaggcgtgtacggtgggaggtctatataagcagagctcgtttagtgaaccgtcagatcgcctggagacgccatccacgctgttttgacctccatagaagacaccgggaccgatccagcctccgcggctcgcatctctccttcacgcgcccgccgccctacctgaggccgccatccacgccggttgagtcgcgttctgccgcctcccgcctgtggtgcctcctgaactgcgtccgccgtctaggtaagtttaaagctcaggtcgagaccgggcctttgtccggcgctcccttggagcctacctagactcagccggctctccacgctttgcctgaccctgcttgctcaactctagttctctcgttaacttaatgagacagatagaaactggtcttgtagaaacagagtagtcgcctgcttttctgccaggtgctgacttctctcccctgggcttttttctttttctcaggttgaaaagaagaagacgaagaagacgaagaagacaaaccgtcgtcgacagatctttttccctctgccaaaaattatggggacatcatgaagccccttgagcatctgacttctggctaataaaggaaatttattttcattgcaatagtgtgttggaattttttgtgtctctcactcggaaggacataagggcggccgctagcccgcctaatgagcgggcttttttttcttagggtgcaaaaggagagcctgtaagcgggcactcttccgtggtctggtggataaattcgcaagggtatcatggcggacgaccggggttcgagccccgtatccggccgtccgccgtgatccatgcggttaccgcccgcgtgtcgaacccaggtgtgcgacgtcagacaacgggggagtgctccttttggcttccttcccctaccggggccgctagc

SEQ ID NO: 2670 - DNA, 1667 bp, Artificial Sequence
  NT9385R vector
ccgcctaatgagcgggcttttttttggcttgttgtccacaaccgttaaaccttaaaagctttaaaagccttatatattcttttttttcttataaaacttaaaaccttagaggctatttaagttgctgatttatattaattttattgttcaaacatgagagcttagtacgtgaaacatgagagcttagtacgttagccatgagagcttagtacgttagccatgagggtttagttcgttaaacatgagagcttagtacgttaaacatgagagcttagtacgtactatcaacaggttgaactgctgatccacgttgtggtagaattggtaaagagagtcgtgtaaaatatcgagttcgcacatcttgttgtctgattattgatttttggcgaaaccatttgatcatatgacaagatgtgtatctaccttaacttaatgattttgataaaaatcattaggtaccccggctctagttattaatagtaatcaattacggggtcattagttcatagcccatatatggagttccgcgttacataacttacggtaaatggcccgcctggctgaccgcccaacgacccccgcccattgacgtcaataatgacgtatgttcccatagtaacgccaatagggactttccattgacgtcaatgggtggagtatttacggtaaactgcccacttggcagtacatcaagtgtatcatatgccaagtacgccccctattgacgtcaatgacggtaaatggcccgcctggcattatgcccagtacatgaccttatgggactttcctacttggcagtacatctacgtattagtcatcgctattaccatggtgatgcggttttggcagtacatcaatgggcgtggatagcggtttgactcacggggatttccaagtctccaccccattgacgtcaatgggagtttgttttggcaccaaaatcaacgggactttccaaaatgtcgtaacaactccgccccattgacgcaaatgggcggtaggcgtgtacggtgggaggtctatataagcagagctcgtttagtgaaccgtcagatcgcctggagacgccatccacgctgttttgacctccatagaagacaccgggaccgatccagcctccgcggctcgcatctctccttcacgcgcccgccgccctacctgaggccgccatccacgccggttgagtcgcgttctgccgcctcccgcctgtggtgcctcctgaactgcgtccgccgtctaggtaagtttaaagctcaggtcgagaccgggcctttgtccggcgctcccttggagcctacctagactcagccggctctccacgctttgcctgaccctgcttgctcaactctagttctctcgttaacttaatgagacagatagaaactggtcttgtagaaacagagtagtcgcctgcttttctgccaggtgctgacttctctcccctgggcttttttctttttctcaggttgaaaagaagaagacgaagaagacgaagaagacaaaccgtcgtcgacagatctttttccctctgccaaaaattatggggacatcatgaagccccttgagcatctgacttctggctaataaaggaaatttattttcattgcaatagtgtgttggaattttttgtgtctctcactcggaaggacataagggcggccgctagc

SEQ ID NO: 2671 - DNA, 2103 bp, Artificial Sequence
  NT9685R vector
ccgcctaatgagcgggcttttttttggcttgttgtccacaaccgttaaaccttaaaagctttaaaagccttatatattcttttttttcttataaaacttaaaaccttagaggctatttaagttgctgatttatattaattttattgttcaaacatgagagcttagtacgtgaaacatgagagcttagtacgttagccatgagagcttagtacgttagccatgagggtttagttcgttaaacatgagagcttagtacgttaaacatgagagcttagtacgtactatcaacaggttgaactgctgatccacgttgtggtagaattggtaaagagagtcgtgtaaaatatcgagttcgcacatcttgttgtctgattattgatttttggcgaaaccatttgatcatatgacaagatgtgtatctaccttaacttaatgattttgataaaaatcattaggtacccctgatcactgtggaatgtgtgtcagttagggtgtggaaagtccccaggctccccagcaggcagaagtatgcaaagcatgcatctcaattagtcagcaaccaggtgtggaaagtccccaggctccccagcaggcagaagtatgcaaagcatgcatctcaattagtcagcaaccatagtcccgcccctaactccgcccatcccgcccctaactccgcccagttacggggtcattagttcatagcccatatatggagttccgcgttacataacttacggtaaatggcccgcctggctgaccgcccaacgacccccgcccattgacgtcaataatgacgtatgttcccatagtaacgccaatagggactttccattgacgtcaatgggtggagtatttacggtaaactgcccacttggcagtacatcaagtgtatcatatgccaagtacgccccctattgacgtcaatgacggtaaatggcccgcctggcattatgcccagtacatgaccttatgggactttcctacttggcagtacatctacgtattagtcatcgctattaccatggtgatgcggttttggcagtacatcaatgggcgtggatagcggtttgactcacggggatttccaagtctccaccccattgacgtcaatgggagtttgttttggcaccaaaatcaacgggactttccaaaatgtcgtaacaactccgccccattgacgcaaatgggcggtaggcgtgtacggtgggaggtctatataagcagagctcgtttagtgaaccgtcagatcgcctggagacgccatccacgctgttttgacctccatagaagacaccgggaccgatccagcctccgcggctcgcatctctccttcacgcgcccgccgccctacctgaggccgccatccacgccggttgagtcgcgttctgccgcctcccgcctgtggtgcctcctgaactgcgtccgccgtctaggtaagtttaaagctcaggtcgagaccgggcctttgtccggcgctcccttggagcctacctagactcagccggctctccacgctttgcctgaccctgcttgctcaactctagttctctcgttaacttaatgagacagatagaaactggtcttgtagaaacagagtagtcgcctgcttttctgccaggtgctgacttctctcccctgggcttttttctttttctcaggttgaaaagaagaagacgaagaagacgaagaagacaaaccgtcgtcgacagatctttttccctctgccaaaaattatggggacatcatgaagccccttgagcatctgacttctggctaataaaggaaatttattttcattgcaatagtgtgttggaattttttgtgtctctcactcggaaggacataagggcggccgctagcccgcctaatgagcgggcttttttttcttagggtgcaaaaggagagcctgtaagcgggcactcttccgtggtctggtggataaattcgcaagggtatcatggcggacgaccggggttcgagccccgtatccggccgtccgccgtgatccatgcggttaccgcccgcgtgtcgaacccaggtgtgcgacgtcagacaacgggggagtgctccttttggcttccttcccctaccggggccgctagc

SEQ ID NO: 2672 - protein, 5 aa, Artificial Sequence
  h1F6_VHJ_VLA-CDRH1
NYGMN

SEQ ID NO: 2673 - protein, 17 aa, Artificial Sequence
  h1F6_VHJ_VLA-CDRH2
WINTYTGEPTYADAFKG

SEQ ID NO: 2674 - protein, 9 aa, Artificial Sequence
  h1F6_VHJ_VLA-CDRH3
DYGDYGMDY

SEQ ID NO: 2675 - protein, 15 aa, Artificial Sequence
  h1F6_VHJ_VLA-CDRL1
RASKSVSTSGYSFMH

SEQ ID NO: 2676 - protein, 7 aa, Artificial Sequence
  h1F6_VHJ_VLA-CDRL2
LASNLES

SEQ ID NO: 2677 - protein, 9 aa, Artificial Sequence
  h1F6_VHJ_VLA-CDRL3
QHSREVPWT

SEQ ID NO: 2678 - DNA, 19 bp, Artificial Sequence
  CD70-siRNA1
caccaaggttgtaccattg

SEQ ID NO: 2679 - DNA, 19 bp, Artificial Sequence
  CD70-siRNA2
gcatctacatggtacacat

SEQ ID NO: 2680 - DNA, 19 bp, Artificial Sequence
  CD70-siRNA3
gcagctgaatcacacagga

SEQ ID NO: 2681 - DNA, 19 bp, Artificial Sequence
  CD70-siRNA4
tgaccactgctgctgatta

SEQ ID NO: 2682 - DNA, 36 bp, Artificial Sequence
  gRNA targeting CD70
cagctacgtatccatcgtgagttttagagctatgct

SEQ ID NO: 2683 - DNA, 18 bp, Artificial Sequence
  gRNA targeting CD70
gctacgtatccatcgtga

SEQ ID NO: 2684 - DNA, 19 bp, Artificial Sequence
  gRNA targeting CD70
gtacacatccaggtgacgc

SEQ ID NO: 2685 - DNA, 18 bp, Artificial Sequence
  gRNA targeting CD70
gcaggctgatgctacggg

SEQ ID NO: 2686 - DNA, 20 bp, Artificial Sequence
  gRNA targeting CD70
tcaccaagcccgcgaccaat

SEQ ID NO: 2687 - protein, 636 aa, Artificial Sequence
  Synthetic Polypeptide
MMLNVVLKSGKLESQSQEQSSCYLENSNCLPPTLDSTDIIGEENKAGTTSRKKRKYDEDYLNFGFTWTGDKDEPNGLCVICEVVNNSSLNPAKLKRHLDTKHPTLKGKSEYFKRKCNELNQKKHTFERYVRDDNKNLLKASYLVSLRIAKQGEAYTIAEKLIKPCTKDLTTCVFGEKFASKVDLVPLSDTTISRRIEDMSYFCEAVLVNRLKNAKCGFTLQMDESTDVAGLAILLVFVRYIHESSFEEDMLFCKALPTQTTGEELFNLLNAYFEKHSIPWNLCYHLCTDGAKAMVGVIKGVLARLKKLVPDLKASHCCLHRHALAVKRIPNALHEVLNDAVKMINFLKSRPLNARVFALLCDDLGSLHKNLLLHTEVRWLSRGKVLTRFWELRDEIRIFFNEREFAGKLNDTSWLQNLAYIADIFSYLNEVNLSLQGPNSTIFKVNSRINSIKSKLKLWEECITKNNTECFANLNDFLETSNTALDPNLKSNILEHLNGLKNTFLEYFPPTCNNISWVENPFNECGNVDTLPIKEREQLIDIRTDTTLKSSFVPDGLGPFWIKLMDEFPELSKRAVKELMPFVTTYLCEKSFSVYVATKTKYRNRLDAEDDMRLQLTTIHPDIDNLCNNKQAQKSH

SEQ ID NO: 2688 - protein, 245 aa, Artificial Sequence
  CD70 scFv (1F6)
QVQLVQSGAEVKKPGASVKVSCKASGYTFTNYGMNWVRQAPGQGLKWMGWINTYTGEPTYADAFKGRVTMTRDTSISTAYMELSRLRSDDTAVYYCARDYGDYGMDYWGQGTTVTVSSGGGGSGGGGSGGGGSGDIVMTQSPDSLAVSLGERATINCRASKSVSTSGYSFMHWYQQKPGQPPKLLIYLASNLESGVPDRFSGSGSGTDFTLTISSLQAEDVAVYYCQHSREVPWTFGQGTKVEIK

SEQ ID NO: 2689 - protein, 19 aa, Artificial Sequence
  IgG1 short
AEPKSPDKTHTCPPCPKDP

SEQ ID NO: 2690 - protein, 12 aa, Artificial Sequence
  IgG4 short
ESKYGPPCPSCP

SEQ ID NO: 2691 - protein, 119 aa, Artificial Sequence
  IgG4 hinge-CH3
ESKYGPPCPSCPGQPREPQVYTLPPSQEEMTKNQVSLTCLVKGFYPSDIAVEWESNGQPENNYKTTPPVLDSDGSFFLYSRLTVDKSRWQEGNVFSCSVMHEALHNHYTQKSLSLSLGK

SEQ ID NO: 2692 - protein, 229 aa, Artificial Sequence
  IgG4 mutant
ESKYGPPCPSCPAPEFEGGPSVFLFPPKPKDTLMISRTPEVTCVVVDVSQEDPEVQFNWYVDGVEVHNAKTKPREEQFQSTYRVVSVLTVLHQDWLNGKEYKCKVSNKGLPSSIEKTISKAKGQPREPQVYTLPPSQEEMTKNQVSLTCLVKGFYPSDIAVEWESNGQPENNYKTTPPVLDSDGSFFLYSRLTVDKSRWQEGNVFSCSVMHEALHNHYTQKSLSLSLGK

SEQ ID NO: 2693 - protein, 229 aa, Artificial Sequence
  IgG4 mutant-1
ESKYGPPCPSCPAPEFEGGPSVFLFPPKPKDTLMISRTPEVTCVVVDVSQEDPEVQFNWYVDGVEVHNAKTKPREEQFNSTYRVVSVLTVLHQDWLNGKEYKCKVSNKGLPSSIEKTISKAKGQPREPQVYTLPPSQEEMTKNQVSLTCLVKGFYPSDIAVEWESNGQPENNYKTTPPVLDSDGSFFLYSRLTVDKSRWQEGNVFSCSVMHEALHNHYTQKSLSLSLGK

SEQ ID NO: 2694 - protein, 229 aa, Artificial Sequence
  IgG4 mutant-2
ESKYGPPCPSCPAPEFLGGPSVFLFPPKPKDTLMISRTPEVTCVVVDVSQEDPEVQFNWYVDGVEVHNAKTKPREEQFQSTYRVVSVLTVLHQDWLNGKEYKCKVSNKGLPSSIEKTISKAKGQPREPQVYTLPPSQEEMTKNQVSLTCLVKGFYPSDIAVEWESNGQPENNYKTTPPVLDSDGSFFLYSRLTVDKSRWQEGNVFSCSVMHEALHNHYTQKSLSLSLGK

SEQ ID NO: 2695 - protein, 22 aa, Artificial Sequence
  OX40L
ERVQPLEENVGNAARPRFERNK

SEQ ID NO: 2696 - protein, 205 aa, Artificial Sequence
  TGFBR2 DNR-CD28TM
MGRGLLRGLWPLHIVLWTRIASTIPPHVQKSVNNDMIVTDNNGAVKFPQLCKFCDVRFSTCDNQKSCMSNCSITSICEKPQEVCVAVWRKNDENITLETVCHDPKLPYHDFILEDAASPKCIMKEKKKPGETFFMCSCSSDECNDNIIFSEEYNTSNPDLLLVIFQFWVLVVVGGVLACYSLLVTVAFIIFWVCYRVNRQQKLSS

SEQ ID NO: 2697 - protein, 480 aa, Artificial Sequence
  CAT-70-001 (without signal peptide)
QVQLVQSGAEVKKPGASVKVSCKASGYTFTNYGMNWVRQAPGQGLKWMGWINTYTGEPTYADAFKGRVTMTRDTSISTAYMELSRLRSDDTAVYYCARDYGDYGMDYWGQGTTVTVSSGGGGSGGGGSGGGGSGDIVMTQSPDSLAVSLGERATINCRASKSVSTSGYSFMHWYQQKPGQPPKLLIYLASNLESGVPDRFSGSGSGTDFTLTISSLQAEDVAVYYCQHSREVPWTFGQGTKVEIKFVPVFLPAKPTTTPAPRPPTPAPTIASQPLSLRPEACRPAAGGAVHTRGLDFACDFWVLVVVGGVLACYSLLVTVAFIIFWVRSKRSRLLHSDYMNMTPRRPGPTRKHYQPYAPPRDFAAYRSRVKFSRSADAPAYQQGQNQLYNELNLGRREEYDVLDKRRGRDPEMGGKPRRKNPQEGLYNELQKDKMAEAYSEIGMKGERRRGKGHDGLYQGLSTATKDTYDALHMQALPPR

SEQ ID NO: 2698 - protein, 466 aa, Artificial Sequence
  CAT-70-002 (without signal peptide)
QVQLVQSGAEVKKPGASVKVSCKASGYTFTNYGMNWVRQAPGQGLKWMGWINTYTGEPTYADAFKGRVTMTRDTSISTAYMELSRLRSDDTAVYYCARDYGDYGMDYWGQGTTVTVSSGGGGSGGGGSGGGGSGDIVMTQSPDSLAVSLGERATINCRASKSVSTSGYSFMHWYQQKPGQPPKLLIYLASNLESGVPDRFSGSGSGTDFTLTISSLQAEDVAVYYCQHSREVPWTFGQGTKVEIKFVPVFLPAKPTTTPAPRPPTPAPTIASQPLSLRPEACRPAAGGAVHTRGLDFACDPFFFCCFIAVAMGIRFIIMVAIWSAVFLNSLCARPRRSPAQEDGKVYINMPGRGRVKFSRSADAPAYQQGQNQLYNELNLGRREEYDVLDKRRGRDPEMGGKPRRKNPQEGLYNELQKDKMAEAYSEIGMKGERRRGKGHDGLYQGLSTATKDTYDALHMQALPPR

SEQ ID NO: 2699 - protein, 494 aa, Artificial Sequence
  CAT-70-003 (without signal peptide)
QVQLVQSGAEVKKPGASVKVSCKASGYTFTNYGMNWVRQAPGQGLKWMGWINTYTGEPTYADAFKGRVTMTRDTSISTAYMELSRLRSDDTAVYYCARDYGDYGMDYWGQGTTVTVSSGGGGSGGGGSGGGGSGDIVMTQSPDSLAVSLGERATINCRASKSVSTSGYSFMHWYQQKPGQPPKLLIYLASNLESGVPDRFSGSGSGTDFTLTISSLQAEDVAVYYCQHSREVPWTFGQGTKVEIKFVPVFLPAKPTTTPAPRPPTPAPTIASQPLSLRPEACRPAAGGAVHTRGLDFACDPFFFCCFIAVAMGIRFIIMVAIWSAVFLNSYFLGRLVPRGRGAAEAATRKQRITETESPYQELQGQRSDVYSDLNTQRPYYKRVKFSRSADAPAYQQGQNQLYNELNLGRREEYDVLDKRRGRDPEMGGKPRRKNPQEGLYNELQKDKMAEAYSEIGMKGERRRGKGHDGLYQGLSTATKDTYDALHMQALPPR

SEQ ID NO: 2700 - protein, 353 aa, Artificial Sequence
  CAT-70-004 (without signal peptide)
ATPAPKSCPERHYWAQGKLCCQMCEPGTFLVKDCDQHRKAAQCDPCIPGVSFSPDHHTRPHCESCRHCNSGLLVRNCTITANAECACRNGWQCRDKECTECDPLPNPSLTARSSQALSPHPQPTHLPYVSEMLEARTAGHMQTLADFRQLPARTLSTHWPPQRSLCSSDFIRILVIFSGMFLVFTLAGALFLHQRRKYRSNKGESPVEPAEPCHYSCPREEEGSTIPIQEDYRKPEPACSPRVKFSRSADAPAYQQGQNQLYNELNLGRREEYDVLDKRRGRDPEMGGKPRRKNPQEGLYNELQKDKMAEAYSEIGMKGERRRGKGHDGLYQGLSTATKDTYDALHMQALPPR

SEQ ID NO: 2701 - protein, 352 aa, Artificial Sequence
  CAT-70-005 (without signal peptide)
ATPAPKSCPERHYWAQGKLCCQMCEPGTFLVKDCDQHRKAAQCDPCIPGVSFSPDHHTRPHCESCRHCNSGLLVRNCTITANAECACRNGWQCRDKECTECDPLPNPSLTARSSQALSPHPQPTHLPYVSEMLEARTAGHMQTLADFRQLPARTLSTHWPPQRSLCSSDFIRFWVLVVVGGVLACYSLLVTVAFIIFWVRSKRSRLLHSDYMNMTPRRPGPTRKHYQPYAPPRDFAAYRSRVKFSRSADAPAYQQGQNQLYNELNLGRREEYDVLDKRRGRDPEMGGKPRRKNPQEGLYNELQKDKMAEAYSEIGMKGERRRGKGHDGLYQGLSTATKDTYDALHMQALPPR

SEQ ID NO: 2702 - protein, 338 aa, Artificial Sequence
  CAT-70-006 (without signal peptide)
ATPAPKSCPERHYWAQGKLCCQMCEPGTFLVKDCDQHRKAAQCDPCIPGVSFSPDHHTRPHCESCRHCNSGLLVRNCTITANAECACRNGWQCRDKECTECDPLPNPSLTARSSQALSPHPQPTHLPYVSEMLEARTAGHMQTLADFRQLPARTLSTHWPPQRSLCSSDFIRPFFFCCFIAVAMGIRFIIMVAIWSAVFLNSLCARPRRSPAQEDGKVYINMPGRGRVKFSRSADAPAYQQGQNQLYNELNLGRREEYDVLDKRRGRDPEMGGKPRRKNPQEGLYNELQKDKMAEAYSEIGMKGERRRGKGHDGLYQGLSTATKDTYDALHMQALPPR

SEQ ID NO: 2703 - protein, 366 aa, Artificial Sequence
  CAT-70-007 (without signal peptide)
ATPAPKSCPERHYWAQGKLCCQMCEPGTFLVKDCDQHRKAAQCDPCIPGVSFSPDHHTRPHCESCRHCNSGLLVRNCTITANAECACRNGWQCRDKECTECDPLPNPSLTARSSQALSPHPQPTHLPYVSEMLEARTAGHMQTLADFRQLPARTLSTHWPPQRSLCSSDFIRPFFFCCFIAVAMGIRFIIMVAIWSAVFLNSYFLGRLVPRGRGAAEAATRKQRITETESPYQELQGQRSDVYSDLNTQRPYYKRVKFSRSADAPAYQQGQNQLYNELNLGRREEYDVLDKRRGRDPEMGGKPRRKNPQEGLYNELQKDKMAEAYSEIGMKGERRRGKGHDGLYQGLSTATKDTYDALHMQALPPR

SEQ ID NO: 2704 - protein, 347 aa, Artificial Sequence
  CAT-70-119 (without signal peptide)
ATPAPKSCPERHYWAQGKLCCQMCEPGTFLVKDCDQHRKAAQCDPCIPGVSFSPDHHTRPHCESCRHCNSGLLVRNCTITANAECACRNGWQCRDKECTECDPLPNPSLTARSSQALSPHPQPTHLPYVSEMLEARTAGHMQTLADFRQLPARTLSTHWPPQRSLCSSDFIRILVIFSGMFLVFTLAGALFLRKRGRKKLLYIFKQPFMRPVQTTQEEDGCSCRFPEEEEGGCELRVKFSRSADAPAYQQGQNQLYNELNLGRREEYDVLDKRRGRDPEMGGKPRRKNPQEGLYNELQKDKMAEAYSEIGMKGERRRGKGHDGLYQGLSTATKDTYDALHMQALPPR

SEQ ID NO: 2705 - protein, 410 aa, Artificial Sequence
  CAT-70-122 (without signal peptide)
ATPAPKSCPERHYWAQGKLCCQMCEPGTFLVKDCDQHRKAAQCDPCIPGVSFSPDHHTRPHCESCRHCNSGLLVRNCTITANAECACRNGWQCRDKECTECDPLPNPSLTARSSQALSPHPQPTHLPYVSEMLEARTAGHMQTLADFRQLPARTLSTHWPPQRSLCSSDFIRFVPVFLPAKPTTTPAPRPPTPAPTIASQPLSLRPEACRPAAGGAVHTRGLDFACDIYIWAPLAGTCGVLLLSLVITLYCNHRNRKRGRKKLLYIFKQPFMRPVQTTQEEDGCSCRFPEEEEGGCELRVKFSRSADAPAYQQGQNQLYNELNLGRREEYDVLDKRRGRDPEMGGKPRRKNPQEGLYNELQKDKMAEAYSEIGMKGERRRGKGHDGLYQGLSTATKDTYDALHMQALPPR

SEQ ID NO: 2706 - protein, 345 aa, Artificial Sequence
  CAT-70-124 (without signal peptide)
ATPAPKSCPERHYWAQGKLCCQMCEPGTFLVKDCDQHRKAAQCDPCIPGVSFSPDHHTRPHCESCRHCNSGLLVRNCTITANAECACRNGWQCRDKECTECDPLPNPSLTARSSQALSPHPQPTHLPYVSEMLEARTAGHMQTLADFRQLPARTLSTHWPPQRSLCSSDFIRILVIFSGMFLVFTLAGALFLRSKRSRLLHSDYMNMTPRRPGPTRKHYQPYAPPRDFAAYRSRVKFSRSADAPAYQQGQNQLYNELNLGRREEYDVLDKRRGRDPEMGGKPRRKNPQEGLYNELQKDKMAEAYSEIGMKGERRRGKGHDGLYQGLSTATKDTYDALHMQALPPR

SEQ ID NO: 2707 - protein, 408 aa, Artificial Sequence
  CAT-70-125 (without signal peptide)
ATPAPKSCPERHYWAQGKLCCQMCEPGTFLVKDCDQHRKAAQCDPCIPGVSFSPDHHTRPHCESCRHCNSGLLVRNCTITANAECACRNGWQCRDKECTECDPLPNPSLTARSSQALSPHPQPTHLPYVSEMLEARTAGHMQTLADFRQLPARTLSTHWPPQRSLCSSDFIRFVPVFLPAKPTTTPAPRPPTPAPTIASQPLSLRPEACRPAAGGAVHTRGLDFACDIYIWAPLAGTCGVLLLSLVITLYCNHRNRSKRSRLLHSDYMNMTPRRPGPTRKHYQPYAPPRDFAAYRSRVKFSRSADAPAYQQGQNQLYNELNLGRREEYDVLDKRRGRDPEMGGKPRRKNPQEGLYNELQKDKMAEAYSEIGMKGERRRGKGHDGLYQGLSTATKDTYDALHMQALPPR

SEQ ID NO: 2708 - protein, 483 aa, Artificial Sequence
  CAT-70-127 (without signal peptide)
QVQLVQSGAEVKKPGASVKVSCKASGYTFTNYGMNWVRQAPGQGLKWMGWINTYTGEPTYADAFKGRVTMTRDTSISTAYMELSRLRSDDTAVYYCARDYGDYGMDYWGQGTTVTVSSGGGGSGGGGSGGGGSGDIVMTQSPDSLAVSLGERATINCRASKSVSTSGYSFMHWYQQKPGQPPKLLIYLASNLESGVPDRFSGSGSGTDFTLTISSLQAEDVAVYYCQHSREVPWTFGQGTKVEIKFVPVFLPAKPTTTPAPRPPTPAPTIASQPLSLRPEACRPAAGGAVHTRGLDFACDIYIWAPLAGTCGVLLLSLVITLYCNHRNRKRGRKKLLYIFKQPFMRPVQTTQEEDGCSCRFPEEEEGGCELRVKFSRSADAPAYQQGQNQLYNELNLGRREEYDVLDKRRGRDPEMGGKPRRKNPQEGLYNELQKDKMAEAYSEIGMKGERRRGKGHDGLYQGLSTATKDTYDALHMQALPPR

SEQ ID NO: 2709 - protein, 657 aa, Artificial Sequence
  CAT-70-130 (without signal peptide)
QVQLVQSGAEVKKPGASVKVSCKASGYTFTNYGMNWVRQAPGQGLKWMGWINTYTGEPTYADAFKGRVTMTRDTSISTAYMELSRLRSDDTAVYYCARDYGDYGMDYWGQGTTVTVSSGGGGSGGGGSGGGGSGDIVMTQSPDSLAVSLGERATINCRASKSVSTSGYSFMHWYQQKPGQPPKLLIYLASNLESGVPDRFSGSGSGTDFTLTISSLQAEDVAVYYCQHSREVPWTFGQGTKVEIKEPKSCDKTHTCPPCPAPELLGGPSVFLFPPKPKDTLMISRTPEVTCVVVDVSHEDPEVKFNWYVDGVEVHNAKTKPREEQYNSTYRVVSVLTVLHQDWLNGKEYKCKVSNKALPAPIEKTISKAKGQPREPQVYTLPPSRDELTKNQVSLTCLVKGFYPSDIAVEWESNGQPENNYKTTPPVLDSDGSFFLYSKLTVDKSRWQQGNVFSCSVMHEALHNHYTQKSLSLSPGKFWVLVVVGGVLACYSLLVTVAFIIFWVRSKRSRLLHSDYMNMTPRRPGPTRKHYQPYAPPRDFAAYRSRVKFSRSADAPAYQQGQNQLYNELNLGRREEYDVLDKRRGRDPEMGGKPRRKNPQEGLYNELQKDKMAEAYSEIGMKGERRRGKGHDGLYQGLSTATKDTYDALHMQALPPR

SEQ ID NO: 2710 - protein, 464 aa, Artificial Sequence
  CAT-70-133 (without signal peptide)
QVQLVQSGAEVKKPGASVKVSCKASGYTFTNYGMNWVRQAPGQGLKWMGWINTYTGEPTYADAFKGRVTMTRDTSISTAYMELSRLRSDDTAVYYCARDYGDYGMDYWGQGTTVTVSSGGGGSGGGGSGGGGSGDIVMTQSPDSLAVSLGERATINCRASKSVSTSGYSFMHWYQQKPGQPPKLLIYLASNLESGVPDRFSGSGSGTDFTLTISSLQAEDVAVYYCQHSREVPWTFGQGTKVEIKIEVMYPPPYLDNEKSNGTIIHVKGKHLCPSPLFPGPSKPFWVLVVVGGVLACYSLLVTVAFIIFWVRSKRSRLLHSDYMNMTPRRPGPTRKHYQPYAPPRDFAAYRSRVKFSRSADAPAYQQGQNQLYNELNLGRREEYDVLDKRRGRDPEMGGKPRRKNPQEGLYNELQKDKMAEAYSEIGMKGERRRGKGHDGLYQGLSTATKDTYDALHMQALPPR

SEQ ID NO: 2711 - protein, 481 aa, Artificial Sequence
  CAT-70-135 (without signal peptide)
QVQLVQSGAEVKKPGASVKVSCKASGYTFTNYGMNWVRQAPGQGLKWMGWINTYTGEPTYADAFKGRVTMTRDTSISTAYMELSRLRSDDTAVYYCARDYGDYGMDYWGQGTTVTVSSGGGGSGGGGSGGGGSGDIVMTQSPDSLAVSLGERATINCRASKSVSTSGYSFMHWYQQKPGQPPKLLIYLASNLESGVPDRFSGSGSGTDFTLTISSLQAEDVAVYYCQHSREVPWTFGQGTKVEIKFVPVFLPAKPTTTPAPRPPTPAPTIASQPLSLRPEACRPAAGGAVHTRGLDFACDIYIWAPLAGTCGVLLLSLVITLYCNHRNRSKRSRLLHSDYMNMTPRRPGPTRKHYQPYAPPRDFAAYRSRVKFSRSADAPAYQQGQNQLYNELNLGRREEYDVLDKRRGRDPEMGGKPRRKNPQEGLYNELQKDKMAEAYSEIGMKGERRRGKGHDGLYQGLSTATKDTYDALHMQALPPR

SEQ ID NO: 2712 - protein, 293 aa, Artificial Sequence
  CAT-70-136 (without signal peptide)
ATPAPKSCPERHYWAQGKLCCQMCEPGTFLVKDCDQHRKAAQCDPCIPGVSFSPDHHTRPHCESCRHCNSGLLVRNCTITANAECACRNGWQCRDKECTECDPLPNPSLTARSSQALSPHPQPTHLPYVSEMLEARTAGHMQTLADFRQLPARTLSTHWPPQRSLCSSDFIRILVIFSGMFLVFTLAGALFLHQRRKYRSNKGESPVEPAEPCHYSCPREEEGSTIPIQEDYRKPEPACSPYFLGRLVPRGRGAAEAATRKQRITETESPYQELQGQRSDVYSDLNTQRPYYK

SEQ ID NO: 2713 - protein, 283 aa, Artificial Sequence
  CAT-70-137 (without signal peptide)
ATPAPKSCPERHYWAQGKLCCQMCEPGTFLVKDCDQHRKAAQCDPCIPGVSFSPDHHTRPHCESCRHCNSGLLVRNCTITANAECACRNGWQCRDKECTECDPLPNPSLTARSSQALSPHPQPTHLPYVSEMLEARTAGHMQTLADFRQLPARTLSTHWPPQRSLCSSDFIRILVIFSGMFLVFTLAGALFLHQRRKYRSNKGESPVEPAEPCHYSCPREEEGSTIPIQEDYRKPEPACSPRLKIQVRKAAITSYEKSDGVYTGLSTRNQETYETLKHEKPPQ

SEQ ID NO: 2714 - protein, 329 aa, Artificial Sequence
  CAT-70-140 (without signal peptide)
ATPAPKSCPERHYWAQGKLCCQMCEPGTFLVKDCDQHRKAAQCDPCIPGVSFSPDHHTRPHCESCRHCNSGLLVRNCTITANAECACRNGWQCRDKECTECDPLPNPSLTARSSQALSPHPQPTHLPYVSEMLEARTAGHMQTLADFRQLPARTLSTHWPPQRSLCSSDFIRLLAGLVAADAVASLLIVGAVFLCARPRRSPAQEDGKVYINMPGRGRVKFSRSADAPAYQQGQNQLYNELNLGRREEYDVLDKRRGRDPEMGGKPRRKNPQEGLYNELQKDKMAEAYSEIGMKGERRRGKGHDGLYQGLSTATKDTYDALHMQALPPR

SEQ ID NO: 2715 - protein, 357 aa, Artificial Sequence
  CAT-70-141 (without signal peptide)
ATPAPKSCPERHYWAQGKLCCQMCEPGTFLVKDCDQHRKAAQCDPCIPGVSFSPDHHTRPHCESCRHCNSGLLVRNCTITANAECACRNGWQCRDKECTECDPLPNPSLTARSSQALSPHPQPTHLPYVSEMLEARTAGHMQTLADFRQLPARTLSTHWPPQRSLCSSDFIRGVLAGIVMGDLVLTVLIALAVYFLGRLVPRGRGAAEAATRKQRITETESPYQELQGQRSDVYSDLNTQRPYYKRVKFSRSADAPAYQQGQNQLYNELNLGRREEYDVLDKRRGRDPEMGGKPRRKNPQEGLYNELQKDKMAEAYSEIGMKGERRRGKGHDGLYQGLSTATKDTYDALHMQALPPR

SEQ ID NO: 2716 - protein, 245 aa, Artificial Sequence
  CAT-70-142 (without signal peptide)
ATPAPKSCPERHYWAQGKLCCQMCEPGTFLVKDCDQHRKAAQCDPCIPGVSFSPDHHTRPHCESCRHCNSGLLVRNCTITANAECACRNGWQCRDKECTECDPLPNPSLTARSSQALSPHPQPTHLPYVSEMLEARTAGHMQTLADFRQLPARTLSTHWPPQRSLCSSDFIRGVLAGIVMGDLVLTVLIALAVYFLGRLVPRGRGAAEAATRKQRITETESPYQELQGQRSDVYSDLNTQRPYYK

SEQ ID NO: 2717 - protein, 545 aa, Artificial Sequence
  CAT-70-143 (without signal peptide)
QVQLVQSGAEVKKPGASVKVSCKASGYTFTNYGMNWVRQAPGQGLKWMGWINTYTGEPTYADAFKGRVTMTRDTSISTAYMELSRLRSDDTAVYYCARDYGDYGMDYWGQGTTVTVSSGGGGSGGGGSGGGGSGDIVMTQSPDSLAVSLGERATINCRASKSVSTSGYSFMHWYQQKPGQPPKLLIYLASNLESGVPDRFSGSGSGTDFTLTISSLQAEDVAVYYCQHSREVPWTFGQGTKVEIKEPKSCDKTHTCPPCPAPELLGGPSVFLFPPKPKDTLMISRTPEVTCVVVDVSHEDPEVKFNWYVDGVEVHNAKTKPREEQYNSTYRVVSVLTVLHQDWLNGKEYKCKVSNKALPAPIEKTISKAKGQPREPQVYTLPPSRDELTKNQVSLTCLVKGFYPSDIAVEWESNGQPENNYKTTPPVLDSDGSFFLYSKLTVDKSRWQQGNVFSCSVMHEALHNHYTQKSLSLSPGKFWVLVVVGGVLACYSLLVTVAFIIFWVRSKRSRLLHSDYMNMTPRRPGPTRKHYQPYAPPRDFAAYRS

SEQ ID NO: 2718 - protein, 371 aa, Artificial Sequence
  CAT-70-144 (without signal peptide)
QVQLVQSGAEVKKPGASVKVSCKASGYTFTNYGMNWVRQAPGQGLKWMGWINTYTGEPTYADAFKGRVTMTRDTSISTAYMELSRLRSDDTAVYYCARDYGDYGMDYWGQGTTVTVSSGGGGSGGGGSGGGGSGDIVMTQSPDSLAVSLGERATINCRASKSVSTSGYSFMHWYQQKPGQPPKLLIYLASNLESGVPDRFSGSGSGTDFTLTISSLQAEDVAVYYCQHSREVPWTFGQGTKVEIKFVPVFLPAKPTTTPAPRPPTPAPTIASQPLSLRPEACRPAAGGAVHTRGLDFACDIYIWAPLAGTCGVLLLSLVITLYCNHRNRKRGRKKLLYIFKQPFMRPVQTTQEEDGCSCRFPEEEEGGCEL

SEQ ID NO: 2719 - protein, 440 aa, Artificial Sequence
  CAT-70-145 (without signal peptide)
QVQLVQSGAEVKKPGASVKVSCKASGYTFTNYGMNWVRQAPGQGLKWMGWINTYTGEPTYADAFKGRVTMTRDTSISTAYMELSRLRSDDTAVYYCARDYGDYGMDYWGQGTTVTVSSGGGGSGGGGSGGGGSGDIVMTQSPDSLAVSLGERATINCRASKSVSTSGYSFMHWYQQKPGQPPKLLIYLASNLESGVPDRFSGSGSGTDFTLTISSLQAEDVAVYYCQHSREVPWTFGQGTKVEIKFVPVFLPAKPTTTPAPRPPTPAPTIASQPLSLRPEACRPAAGGAVHTRGLDFACDIYIWAPLAGTCGVLLLSLVITLYCNHRNRVKFSRSADAPAYQQGQNQLYNELNLGRREEYDVLDKRRGRDPEMGGKPRRKNPQEGLYNELQKDKMAEAYSEIGMKGERRRGKGHDGLYQGLSTATKDTYDALHMQALPPR

SEQ ID NO: 2720 - protein, 414 aa, Artificial Sequence
  CAT-70-146 (without signal peptide)
QVQLVQSGAEVKKPGASVKVSCKASGYTFTNYGMNWVRQAPGQGLKWMGWINTYTGEPTYADAFKGRVTMTRDTSISTAYMELSRLRSDDTAVYYCARDYGDYGMDYWGQGTTVTVSSGGGGSGGGGSGGGGSGDIVMTQSPDSLAVSLGERATINCRASKSVSTSGYSFMHWYQQKPGQPPKLLIYLASNLESGVPDRFSGSGSGTDFTLTISSLQAEDVAVYYCQHSREVPWTFGQGTKVEIKFVPVFLPAKPTTTPAPRPPTPAPTIASQPLSLRPEACRPAAGGAVHTRGLDFACDIYIWAPLAGTCGVLLLSLVITLYCNHRNRKRGRKKLLYIFKQPFMRPVQTTQEEDGCSCRFPEEEEGGCELRKRGRKKLLYIFKQPFMRPVQTTQEEDGCSCRFPEEEEGGCEL

SEQ ID NO: 2721 - protein, 560 aa, Artificial Sequence
  CAT-70-147 (without signal peptide)
QVQLVQSGAEVKKPGASVKVSCKASGYTFTNYGMNWVRQAPGQGLKWMGWINTYTGEPTYADAFKGRVTMTRDTSISTAYMELSRLRSDDTAVYYCARDYGDYGMDYWGQGTTVTVSSGGGGSGGGGSGGGGSGDIVMTQSPDSLAVSLGERATINCRASKSVSTSGYSFMHWYQQKPGQPPKLLIYLASNLESGVPDRFSGSGSGTDFTLTISSLQAEDVAVYYCQHSREVPWTFGQGTKVEIKFVPVFLPAKPTTTPAPRPPTPAPTIASQPLSLRPEACRPAAGGAVHTRGLDFACDIYIWAPLAGTCGVLLLSLVITLYCNHRNWRRKRKEKQSETSPKEFLTIYEDVKDLKTRRNHEQEQTFPGGGSTIYSMIQSQSSAPTSQEPAYTLYSLIQPSRKSGSRKRNHSPSFNSTIYEVIGKSQPKAQNPARLSRKELENFDVYSRVKFSRSADAPAYQQGQNQLYNELNLGRREEYDVLDKRRGRDPEMGGKPRRKNPQEGLYNELQKDKMAEAYSEIGMKGERRRGKGHDGLYQGLSTATKDTYDALHMQALPPR

SEQ ID NO: 2722 - protein, 464 aa, Artificial Sequence
  CAT-70-148 (without signal peptide)
QVQLVQSGAEVKKPGASVKVSCKASGYTFTNYGMNWVRQAPGQGLKWMGWINTYTGEPTYADAFKGRVTMTRDTSISTAYMELSRLRSDDTAVYYCARDYGDYGMDYWGQGTTVTVSSGGGGSGGGGSGGGGSGDIVMTQSPDSLAVSLGERATINCRASKSVSTSGYSFMHWYQQKPGQPPKLLIYLASNLESGVPDRFSGSGSGTDFTLTISSLQAEDVAVYYCQHSREVPWTFGQGTKVEIKFVPVFLPAKPTTTPAPRPPTPAPTIASQPLSLRPEACRPAAGGAVHTRGLDFACDIYIWAPLAGTCGVLLLSLVITLYCNHRNLCARPRRSPAQEDGKVYINMPGRGRVKFSRSADAPAYQQGQNQLYNELNLGRREEYDVLDKRRGRDPEMGGKPRRKNPQEGLYNELQKDKMAEAYSEIGMKGERRRGKGHDGLYQGLSTATKDTYDALHMQALPPR

SEQ ID NO: 2723 - protein, 492 aa, Artificial Sequence
  CAT-70-149 (without signal peptide)
QVQLVQSGAEVKKPGASVKVSCKASGYTFTNYGMNWVRQAPGQGLKWMGWINTYTGEPTYADAFKGRVTMTRDTSISTAYMELSRLRSDDTAVYYCARDYGDYGMDYWGQGTTVTVSSGGGGSGGGGSGGGGSGDIVMTQSPDSLAVSLGERATINCRASKSVSTSGYSFMHWYQQKPGQPPKLLIYLASNLESGVPDRFSGSGSGTDFTLTISSLQAEDVAVYYCQHSREVPWTFGQGTKVEIKFVPVFLPAKPTTTPAPRPPTPAPTIASQPLSLRPEACRPAAGGAVHTRGLDFACDIYIWAPLAGTCGVLLLSLVITLYCNHRNYFLGRLVPRGRGAAEAATRKQRITETESPYQELQGQRSDVYSDLNTQRPYYKRVKFSRSADAPAYQQGQNQLYNELNLGRREEYDVLDKRRGRDPEMGGKPRRKNPQEGLYNELQKDKMAEAYSEIGMKGERRRGKGHDGLYQGLSTATKDTYDALHMQALPPR

SEQ ID NO: 2724 - protein, 482 aa, Artificial Sequence
  CAT-70-150 (without signal peptide)
QVQLVQSGAEVKKPGASVKVSCKASGYTFTNYGMNWVRQAPGQGLKWMGWINTYTGEPTYADAFKGRVTMTRDTSISTAYMELSRLRSDDTAVYYCARDYGDYGMDYWGQGTTVTVSSGGGGSGGGGSGGGGSGDIVMTQSPDSLAVSLGERATINCRASKSVSTSGYSFMHWYQQKPGQPPKLLIYLASNLESGVPDRFSGSGSGTDFTLTISSLQAEDVAVYYCQHSREVPWTFGQGTKVEIKFVPVFLPAKPTTTPAPRPPTPAPTIASQPLSLRPEACRPAAGGAVHTRGLDFACDIYIWAPLAGTCGVLLLSLVITLYCNHRNALYLLRRDQRLPPDAHKPPGGGSFRTPIQEEQADAHSTLAKIRVKFSRSADAPAYQQGQNQLYNELNLGRREEYDVLDKRRGRDPEMGGKPRRKNPQEGLYNELQKDKMAEAYSEIGMKGERRRGKGHDGLYQGLSTATKDTYDALHMQALPPR

SEQ ID NO: 2725 - protein, 562 aa, Artificial Sequence
  CAT-70-153 (without signal peptide)
QVQLVQSGAEVKKPGASVKVSCKASGYTFTNYGMNWVRQAPGQGLKWMGWINTYTGEPTYADAFKGRVTMTRDTSISTAYMELSRLRSDDTAVYYCARDYGDYGMDYWGQGTTVTVSSGGGGSGGGGSGGGGSGDIVMTQSPDSLAVSLGERATINCRASKSVSTSGYSFMHWYQQKPGQPPKLLIYLASNLESGVPDRFSGSGSGTDFTLTISSLQAEDVAVYYCQHSREVPWTFGQGTKVEIKFVPVFLPAKPTTTPAPRPPTPAPTIASQPLSLRPEACRPAAGGAVHTRGLDFACDPFFFCCFIAVAMGIRFIIMVAIWSAVFLNSWRRKRKEKQSETSPKEFLTIYEDVKDLKTRRNHEQEQTFPGGGSTIYSMIQSQSSAPTSQEPAYTLYSLIQPSRKSGSRKRNHSPSFNSTIYEVIGKSQPKAQNPARLSRKELENFDVYSRVKFSRSADAPAYQQGQNQLYNELNLGRREEYDVLDKRRGRDPEMGGKPRRKNPQEGLYNELQKDKMAEAYSEIGMKGERRRGKGHDGLYQGLSTATKDTYDALHMQALPPR

SEQ ID NO: 2726 - protein, 457 aa, Artificial Sequence
  CAT-70-154 (without signal peptide)
QVQLVQSGAEVKKPGASVKVSCKASGYTFTNYGMNWVRQAPGQGLKWMGWINTYTGEPTYADAFKGRVTMTRDTSISTAYMELSRLRSDDTAVYYCARDYGDYGMDYWGQGTTVTVSSGGGGSGGGGSGGGGSGDIVMTQSPDSLAVSLGERATINCRASKSVSTSGYSFMHWYQQKPGQPPKLLIYLASNLESGVPDRFSGSGSGTDFTLTISSLQAEDVAVYYCQHSREVPWTFGQGTKVEIKFVPVFLPAKPTTTPAPRPPTPAPTIASQPLSLRPEACRPAAGGAVHTRGLDFACDLLAGLVAADAVASLLIVGAVFLCARPRRSPAQEDGKVYINMPGRGRVKFSRSADAPAYQQGQNQLYNELNLGRREEYDVLDKRRGRDPEMGGKPRRKNPQEGLYNELQKDKMAEAYSEIGMKGERRRGKGHDGLYQGLSTATKDTYDALHMQALPPR

SEQ ID NO: 2727 - protein, 485 aa, Artificial Sequence
  CAT-70-155 (without signal peptide)
QVQLVQSGAEVKKPGASVKVSCKASGYTFTNYGMNWVRQAPGQGLKWMGWINTYTGEPTYADAFKGRVTMTRDTSISTAYMELSRLRSDDTAVYYCARDYGDYGMDYWGQGTTVTVSSGGGGSGGGGSGGGGSGDIVMTQSPDSLAVSLGERATINCRASKSVSTSGYSFMHWYQQKPGQPPKLLIYLASNLESGVPDRFSGSGSGTDFTLTISSLQAEDVAVYYCQHSREVPWTFGQGTKVEIKFVPVFLPAKPTTTPAPRPPTPAPTIASQPLSLRPEACRPAAGGAVHTRGLDFACDGVLAGIVMGDLVLTVLIALAVYFLGRLVPRGRGAAEAATRKQRITETESPYQELQGQRSDVYSDLNTQRPYYKRVKFSRSADAPAYQQGQNQLYNELNLGRREEYDVLDKRRGRDPEMGGKPRRKNPQEGLYNELQKDKMAEAYSEIGMKGERRRGKGHDGLYQGLSTATKDTYDALHMQALPPR

SEQ ID NO: 2728 - protein, 373 aa, Artificial Sequence
  CAT-70-156 (without signal peptide)
QVQLVQSGAEVKKPGASVKVSCKASGYTFTNYGMNWVRQAPGQGLKWMGWINTYTGEPTYADAFKGRVTMTRDTSISTAYMELSRLRSDDTAVYYCARDYGDYGMDYWGQGTTVTVSSGGGGSGGGGSGGGGSGDIVMTQSPDSLAVSLGERATINCRASKSVSTSGYSFMHWYQQKPGQPPKLLIYLASNLESGVPDRFSGSGSGTDFTLTISSLQAEDVAVYYCQHSREVPWTFGQGTKVEIKFVPVFLPAKPTTTPAPRPPTPAPTIASQPLSLRPEACRPAAGGAVHTRGLDFACDGVLAGIVMGDLVLTVLIALAVYFLGRLVPRGRGAAEAATRKQRITETESPYQELQGQRSDVYSDLNTQRPYYK

SEQ ID NO: 2729 - protein, 420 aa, Artificial Sequence
  CAT-70-157 (without signal peptide)
QVQLVQSGAEVKKPGASVKVSCKASGYTFTNYGMNWVRQAPGQGLKWMGWINTYTGEPTYADAFKGRVTMTRDTSISTAYMELSRLRSDDTAVYYCARDYGDYGMDYWGQGTTVTVSSGGGGSGGGGSGGGGSGDIVMTQSPDSLAVSLGERATINCRASKSVSTSGYSFMHWYQQKPGQPPKLLIYLASNLESGVPDRFSGSGSGTDFTLTISSLQAEDVAVYYCQHSREVPWTFGQGTKVEIKFVPVFLPAKPTTTPAPRPPTPAPTIASQPLSLRPEACRPAAGGAVHTRGLDFACDFWVLVVVGGVLACYSLLVTVAFIIFWVRSKRSRLLHSDYMNMTPRRPGPTRKHYQPYAPPRDFAAYRSYFLGRLVPRGRGAAEAATRKQRITETESPYQELQGQRSDVYSDLNTQRPYYK

SEQ ID NO: 2730 - protein, 423 aa, Artificial Sequence
  CAT-70-158 (without signal peptide)
QVQLVQSGAEVKKPGASVKVSCKASGYTFTNYGMNWVRQAPGQGLKWMGWINTYTGEPTYADAFKGRVTMTRDTSISTAYMELSRLRSDDTAVYYCARDYGDYGMDYWGQGTTVTVSSGGGGSGGGGSGGGGSGDIVMTQSPDSLAVSLGERATINCRASKSVSTSGYSFMHWYQQKPGQPPKLLIYLASNLESGVPDRFSGSGSGTDFTLTISSLQAEDVAVYYCQHSREVPWTFGQGTKVEIKFVPVFLPAKPTTTPAPRPPTPAPTIASQPLSLRPEACRPAAGGAVHTRGLDFACDIYIWAPLAGTCGVLLLSLVITLYCNHRNRKRGRKKLLYIFKQPFMRPVQTTQEEDGCSCRFPEEEEGGCELYFLGRLVPRGRGAAEAATRKQRITETESPYQELQGQRSDVYSDLNTQRPYYK

SEQ ID NO: 2731 - protein, 422 aa, Artificial Sequence
  CAT-70-159 (without signal peptide)
QVQLVQSGAEVKKPGASVKVSCKASGYTFTNYGMNWVRQAPGQGLKWMGWINTYTGEPTYADAFKGRVTMTRDTSISTAYMELSRLRSDDTAVYYCARDYGDYGMDYWGQGTTVTVSSGGGGSGGGGSGGGGSGDIVMTQSPDSLAVSLGERATINCRASKSVSTSGYSFMHWYQQKPGQPPKLLIYLASNLESGVPDRFSGSGSGTDFTLTISSLQAEDVAVYYCQHSREVPWTFGQGTKVEIKFVPVFLPAKPTTTPAPRPPTPAPTIASQPLSLRPEACRPAAGGAVHTRGLDFACDIYIWAPLAGTCGVLLLSLVITLYCNHRNALYLLRRDQRLPPDAHKPPGGGSFRTPIQEEQADAHSTLAKIYFLGRLVPRGRGAAEAATRKQRITETESPYQELQGQRSDVYSDLNTQRPYYK

SEQ ID NO: 2732 - protein, 404 aa, Artificial Sequence
  CAT-70-160 (without signal peptide)
QVQLVQSGAEVKKPGASVKVSCKASGYTFTNYGMNWVRQAPGQGLKWMGWINTYTGEPTYADAFKGRVTMTRDTSISTAYMELSRLRSDDTAVYYCARDYGDYGMDYWGQGTTVTVSSGGGGSGGGGSGGGGSGDIVMTQSPDSLAVSLGERATINCRASKSVSTSGYSFMHWYQQKPGQPPKLLIYLASNLESGVPDRFSGSGSGTDFTLTISSLQAEDVAVYYCQHSREVPWTFGQGTKVEIKFVPVFLPAKPTTTPAPRPPTPAPTIASQPLSLRPEACRPAAGGAVHTRGLDFACDIYIWAPLAGTCGVLLLSLVITLYCNHRNLCARPRRSPAQEDGKVYINMPGRGYFLGRLVPRGRGAAEAATRKQRITETESPYQELQGQRSDVYSDLNTQRPYYK

SEQ ID NO: 2733 - protein, 410 aa, Artificial Sequence
  CAT-70-161 (without signal peptide)
QVQLVQSGAEVKKPGASVKVSCKASGYTFTNYGMNWVRQAPGQGLKWMGWINTYTGEPTYADAFKGRVTMTRDTSISTAYMELSRLRSDDTAVYYCARDYGDYGMDYWGQGTTVTVSSGGGGSGGGGSGGGGSGDIVMTQSPDSLAVSLGERATINCRASKSVSTSGYSFMHWYQQKPGQPPKLLIYLASNLESGVPDRFSGSGSGTDFTLTISSLQAEDVAVYYCQHSREVPWTFGQGTKVEIKFVPVFLPAKPTTTPAPRPPTPAPTIASQPLSLRPEACRPAAGGAVHTRGLDFACDFWVLVVVGGVLACYSLLVTVAFIIFWVRSKRSRLLHSDYMNMTPRRPGPTRKHYQPYAPPRDFAAYRSRLKIQVRKAAITSYEKSDGVYTGLSTRNQETYETLKHEKPPQ

SEQ ID NO: 2734 - protein, 413 aa, Artificial Sequence
  CAT-70-162 (without signal peptide)
QVQLVQSGAEVKKPGASVKVSCKASGYTFTNYGMNWVRQAPGQGLKWMGWINTYTGEPTYADAFKGRVTMTRDTSISTAYMELSRLRSDDTAVYYCARDYGDYGMDYWGQGTTVTVSSGGGGSGGGGSGGGGSGDIVMTQSPDSLAVSLGERATINCRASKSVSTSGYSFMHWYQQKPGQPPKLLIYLASNLESGVPDRFSGSGSGTDFTLTISSLQAEDVAVYYCQHSREVPWTFGQGTKVEIKFVPVFLPAKPTTTPAPRPPTPAPTIASQPLSLRPEACRPAAGGAVHTRGLDFACDIYIWAPLAGTCGVLLLSLVITLYCNHRNRKRGRKKLLYIFKQPFMRPVQTTQEEDGCSCRFPEEEEGGCELRLKIQVRKAAITSYEKSDGVYTGLSTRNQETYETLKHEKPPQ

SEQ ID NO: 2735 - protein, 412 aa, Artificial Sequence
  CAT-70-163 (without signal peptide)
QVQLVQSGAEVKKPGASVKVSCKASGYTFTNYGMNWVRQAPGQGLKWMGWINTYTGEPTYADAFKGRVTMTRDTSISTAYMELSRLRSDDTAVYYCARDYGDYGMDYWGQGTTVTVSSGGGGSGGGGSGGGGSGDIVMTQSPDSLAVSLGERATINCRASKSVSTSGYSFMHWYQQKPGQPPKLLIYLASNLESGVPDRFSGSGSGTDFTLTISSLQAEDVAVYYCQHSREVPWTFGQGTKVEIKFVPVFLPAKPTTTPAPRPPTPAPTIASQPLSLRPEACRPAAGGAVHTRGLDFACDIYIWAPLAGTCGVLLLSLVITLYCNHRNALYLLRRDQRLPPDAHKPPGGGSFRTPIQEEQADAHSTLAKIRLKIQVRKAAITSYEKSDGVYTGLSTRNQETYETLKHEKPPQ

SEQ ID NO: 2736 - protein, 394 aa, Artificial Sequence
  CAT-70-164 (without signal peptide)
QVQLVQSGAEVKKPGASVKVSCKASGYTFTNYGMNWVRQAPGQGLKWMGWINTYTGEPTYADAFKGRVTMTRDTSISTAYMELSRLRSDDTAVYYCARDYGDYGMDYWGQGTTVTVSSGGGGSGGGGSGGGGSGDIVMTQSPDSLAVSLGERATINCRASKSVSTSGYSFMHWYQQKPGQPPKLLIYLASNLESGVPDRFSGSGSGTDFTLTISSLQAEDVAVYYCQHSREVPWTFGQGTKVEIKFVPVFLPAKPTTTPAPRPPTPAPTIASQPLSLRPEACRPAAGGAVHTRGLDFACDIYIWAPLAGTCGVLLLSLVITLYCNHRNLCARPRRSPAQEDGKVYINMPGRGRLKIQVRKAAITSYEKSDGVYTGLSTRNQETYETLKHEKPPQ

SEQ ID NO: 2737 - protein, 494 aa, Artificial Sequence
  CAT-CD70-278
MALPVTALLLPLALLLHAARPQVQLVQSGAEVKKPGASVKVSCKASGYTFTNYGMNWVRQAPGQGLKWMGWINTYTGEPTYADAFKGRVTMTRDTSISTAYMELSRLRSDDTAVYYCARDYGDYGMDYWGQGTTVTVSSGGGGSGGGGSGGGGSGDIVMTQSPDSLAVSLGERATINCRASKSVSTSGYSFMHWYQQKPGQPPKLLIYLASNLESGVPDRFSGSGSGTDFTLTISSLQAEDVAVYYCQHSREVPWTFGQGTKVEIKTTTPAPRPPTPAPTIASQPLSLRPEACRPAAGGAVHTRGLDFACDIYIWAPLAGTCGVLLLSLVITLYCNHRNRKRGRKKLLYIFKQPFMRPVQTTQEEDGCSCRFPEEEEGGCELRVKFSRSADAPAYQQGQNQLYNELNLGRREEYDVLDKRRGRDPEMGGKPRRKNPQEGLYNELQKDKMAEAYSEIGMKGERRRGKGHDGLYQGLSTATKDTYDALHMQALPPR

SEQ ID NO: 2738 - protein, 473 aa, Artificial Sequence
  CAT-CD70-278 (without signal peptide)
QVQLVQSGAEVKKPGASVKVSCKASGYTFTNYGMNWVRQAPGQGLKWMGWINTYTGEPTYADAFKGRVTMTRDTSISTAYMELSRLRSDDTAVYYCARDYGDYGMDYWGQGTTVTVSSGGGGSGGGGSGGGGSGDIVMTQSPDSLAVSLGERATINCRASKSVSTSGYSFMHWYQQKPGQPPKLLIYLASNLESGVPDRFSGSGSGTDFTLTISSLQAEDVAVYYCQHSREVPWTFGQGTKVEIKTTTPAPRPPTPAPTIASQPLSLRPEACRPAAGGAVHTRGLDFACDIYIWAPLAGTCGVLLLSLVITLYCNHRNRKRGRKKLLYIFKQPFMRPVQTTQEEDGCSCRFPEEEEGGCELRVKFSRSADAPAYQQGQNQLYNELNLGRREEYDVLDKRRGRDPEMGGKPRRKNPQEGLYNELQKDKMAEAYSEIGMKGERRRGKGHDGLYQGLSTATKDTYDALHMQALPPR

SEQ ID NO: 2739 - protein, 468 aa, Artificial Sequence
  CAT-CD70-291
MALPVTALLLPLALLLHAARPQVQLVQSGAEVKKPGASVKVSCKASGYTFTNYGMNWVRQAPGQGLKWMGWINTYTGEPTYADAFKGRVTMTRDTSISTAYMELSRLRSDDTAVYYCARDYGDYGMDYWGQGTTVTVSSGGGGSGGGGSGGGGSGDIVMTQSPDSLAVSLGERATINCRASKSVSTSGYSFMHWYQQKPGQPPKLLIYLASNLESGVPDRFSGSGSGTDFTLTISSLQAEDVAVYYCQHSREVPWTFGQGTKVEIKAEPKSPDKTHTCPPCPKDPIYIWAPLAGTCGVLLLSLVITLYCNHRNRKRGRKKLLYIFKQPFMRPVQTTQEEDGCSCRFPEEEEGGCELRVKFSRSADAPAYQQGQNQLYNELNLGRREEYDVLDKRRGRDPEMGGKPRRKNPQEGLYNELQKDKMAEAYSEIGMKGERRRGKGHDGLYQGLSTATKDTYDALHMQALPPR

SEQ ID NO: 2740 - protein, 447 aa, Artificial Sequence
  CAT-CD70-291 (without signal peptide)
QVQLVQSGAEVKKPGASVKVSCKASGYTFTNYGMNWVRQAPGQGLKWMGWINTYTGEPTYADAFKGRVTMTRDTSISTAYMELSRLRSDDTAVYYCARDYGDYGMDYWGQGTTVTVSSGGGGSGGGGSGGGGSGDIVMTQSPDSLAVSLGERATINCRASKSVSTSGYSFMHWYQQKPGQPPKLLIYLASNLESGVPDRFSGSGSGTDFTLTISSLQAEDVAVYYCQHSREVPWTFGQGTKVEIKAEPKSPDKTHTCPPCPKDPIYIWAPLAGTCGVLLLSLVITLYCNHRNRKRGRKKLLYIFKQPFMRPVQTTQEEDGCSCRFPEEEEGGCELRVKFSRSADAPAYQQGQNQLYNELNLGRREEYDVLDKRRGRDPEMGGKPRRKNPQEGLYNELQKDKMAEAYSEIGMKGERRRGKGHDGLYQGLSTATKDTYDALHMQALPPR

SEQ ID NO: 2741 - protein, 461 aa, Artificial Sequence
  CAT-CD70-281
MALPVTALLLPLALLLHAARPQVQLVQSGAEVKKPGASVKVSCKASGYTFTNYGMNWVRQAPGQGLKWMGWINTYTGEPTYADAFKGRVTMTRDTSISTAYMELSRLRSDDTAVYYCARDYGDYGMDYWGQGTTVTVSSGGGGSGGGGSGGGGSGDIVMTQSPDSLAVSLGERATINCRASKSVSTSGYSFMHWYQQKPGQPPKLLIYLASNLESGVPDRFSGSGSGTDFTLTISSLQAEDVAVYYCQHSREVPWTFGQGTKVEIKESKYGPPCPSCPIYIWAPLAGTCGVLLLSLVITLYCNHRNRKRGRKKLLYIFKQPFMRPVQTTQEEDGCSCRFPEEEEGGCELRVKFSRSADAPAYQQGQNQLYNELNLGRREEYDVLDKRRGRDPEMGGKPRRKNPQEGLYNELQKDKMAEAYSEIGMKGERRRGKGHDGLYQGLSTATKDTYDALHMQALPPR

SEQ ID NO: 2742 - protein, 440 aa, Artificial Sequence
  CAT-CD70-281 (without signal peptide)
QVQLVQSGAEVKKPGASVKVSCKASGYTFTNYGMNWVRQAPGQGLKWMGWINTYTGEPTYADAFKGRVTMTRDTSISTAYMELSRLRSDDTAVYYCARDYGDYGMDYWGQGTTVTVSSGGGGSGGGGSGGGGSGDIVMTQSPDSLAVSLGERATINCRASKSVSTSGYSFMHWYQQKPGQPPKLLIYLASNLESGVPDRFSGSGSGTDFTLTISSLQAEDVAVYYCQHSREVPWTFGQGTKVEIKESKYGPPCPSCPIYIWAPLAGTCGVLLLSLVITLYCNHRNRKRGRKKLLYIFKQPFMRPVQTTQEEDGCSCRFPEEEEGGCELRVKFSRSADAPAYQQGQNQLYNELNLGRREEYDVLDKRRGRDPEMGGKPRRKNPQEGLYNELQKDKMAEAYSEIGMKGERRRGKGHDGLYQGLSTATKDTYDALHMQALPPR

SEQ ID NO: 2743 - protein, 568 aa, Artificial Sequence
  CAT-CD70-280
MALPVTALLLPLALLLHAARPQVQLVQSGAEVKKPGASVKVSCKASGYTFTNYGMNWVRQAPGQGLKWMGWINTYTGEPTYADAFKGRVTMTRDTSISTAYMELSRLRSDDTAVYYCARDYGDYGMDYWGQGTTVTVSSGGGGSGGGGSGGGGSGDIVMTQSPDSLAVSLGERATINCRASKSVSTSGYSFMHWYQQKPGQPPKLLIYLASNLESGVPDRFSGSGSGTDFTLTISSLQAEDVAVYYCQHSREVPWTFGQGTKVEIKESKYGPPCPSCPGQPREPQVYTLPPSQEEMTKNQVSLTCLVKGFYPSDIAVEWESNGQPENNYKTTPPVLDSDGSFFLYSRLTVDKSRWQEGNVFSCSVMHEALHNHYTQKSLSLSLGKIYIWAPLAGTCGVLLLSLVITLYCNHRNRKRGRKKLLYIFKQPFMRPVQTTQEEDGCSCRFPEEEEGGCELRVKFSRSADAPAYQQGQNQLYNELNLGRREEYDVLDKRRGRDPEMGGKPRRKNPQEGLYNELQKDKMAEAYSEIGMKGERRRGKGHDGLYQGLSTATKDTYDALHMQALPPR

SEQ ID NO: 2744 - protein, 547 aa, Artificial Sequence
  CAT-CD70-280 (without signal peptide)
QVQLVQSGAEVKKPGASVKVSCKASGYTFTNYGMNWVRQAPGQGLKWMGWINTYTGEPTYADAFKGRVTMTRDTSISTAYMELSRLRSDDTAVYYCARDYGDYGMDYWGQGTTVTVSSGGGGSGGGGSGGGGSGDIVMTQSPDSLAVSLGERATINCRASKSVSTSGYSFMHWYQQKPGQPPKLLIYLASNLESGVPDRFSGSGSGTDFTLTISSLQAEDVAVYYCQHSREVPWTFGQGTKVEIKESKYGPPCPSCPGQPREPQVYTLPPSQEEMTKNQVSLTCLVKGFYPSDIAVEWESNGQPENNYKTTPPVLDSDGSFFLYSRLTVDKSRWQEGNVFSCSVMHEALHNHYTQKSLSLSLGKIYIWAPLAGTCGVLLLSLVITLYCNHRNRKRGRKKLLYIFKQPFMRPVQTTQEEDGCSCRFPEEEEGGCELRVKFSRSADAPAYQQGQNQLYNELNLGRREEYDVLDKRRGRDPEMGGKPRRKNPQEGLYNELQKDKMAEAYSEIGMKGERRRGKGHDGLYQGLSTATKDTYDALHMQALPPR

SEQ ID NO: 2745 - protein, 678 aa, Artificial Sequence
  CAT-CD70-279
MALPVTALLLPLALLLHAARPQVQLVQSGAEVKKPGASVKVSCKASGYTFTNYGMNWVRQAPGQGLKWMGWINTYTGEPTYADAFKGRVTMTRDTSISTAYMELSRLRSDDTAVYYCARDYGDYGMDYWGQGTTVTVSSGGGGSGGGGSGGGGSGDIVMTQSPDSLAVSLGERATINCRASKSVSTSGYSFMHWYQQKPGQPPKLLIYLASNLESGVPDRFSGSGSGTDFTLTISSLQAEDVAVYYCQHSREVPWTFGQGTKVEIKESKYGPPCPSCPAPEFLGGPSVFLFPPKPKDTLMISRTPEVTCVVVDVSQEDPEVQFNWYVDGVEVHNAKTKPREEQFNSTYRVVSVLTVLHQDWLNGKEYKCKVSNKGLPSSIEKTISKAKGQPREPQVYTLPPSQEEMTKNQVSLTCLVKGFYPSDIAVEWESNGQPENNYKTTPPVLDSDGSFFLYSRLTVDKSRWQEGNVFSCSVMHEALHNHYTQKSLSLSLGKIYIWAPLAGTCGVLLLSLVITLYCNHRNRKRGRKKLLYIFKQPFMRPVQTTQEEDGCSCRFPEEEEGGCELRVKFSRSADAPAYQQGQNQLYNELNLGRREEYDVLDKRRGRDPEMGGKPRRKNPQEGLYNELQKDKMAEAYSEIGMKGERRRGKGHDGLYQGLSTATKDTYDALHMQALPPR

SEQ ID NO: 2746 - protein, 657 aa, Artificial Sequence
  CAT-CD70-279 (without signal peptide)
QVQLVQSGAEVKKPGASVKVSCKASGYTFTNYGMNWVRQAPGQGLKWMGWINTYTGEPTYADAFKGRVTMTRDTSISTAYMELSRLRSDDTAVYYCARDYGDYGMDYWGQGTTVTVSSGGGGSGGGGSGGGGSGDIVMTQSPDSLAVSLGERATINCRASKSVSTSGYSFMHWYQQKPGQPPKLLIYLASNLESGVPDRFSGSGSGTDFTLTISSLQAEDVAVYYCQHSREVPWTFGQGTKVEIKESKYGPPCPSCPAPEFLGGPSVFLFPPKPKDTLMISRTPEVTCVVVDVSQEDPEVQFNWYVDGVEVHNAKTKPREEQFNSTYRVVSVLTVLHQDWLNGKEYKCKVSNKGLPSSIEKTISKAKGQPREPQVYTLPPSQEEMTKNQVSLTCLVKGFYPSDIAVEWESNGQPENNYKTTPPVLDSDGSFFLYSRLTVDKSRWQEGNVFSCSVMHEALHNHYTQKSLSLSLGKIYIWAPLAGTCGVLLLSLVITLYCNHRNRKRGRKKLLYIFKQPFMRPVQTTQEEDGCSCRFPEEEEGGCELRVKFSRSADAPAYQQGQNQLYNELNLGRREEYDVLDKRRGRDPEMGGKPRRKNPQEGLYNELQKDKMAEAYSEIGMKGERRRGKGHDGLYQGLSTATKDTYDALHMQALPPR

SEQ ID NO: 2747 - protein, 678 aa, Artificial Sequence
  CAT-CD70-293
MALPVTALLLPLALLLHAARPQVQLVQSGAEVKKPGASVKVSCKASGYTFTNYGMNWVRQAPGQGLKWMGWINTYTGEPTYADAFKGRVTMTRDTSISTAYMELSRLRSDDTAVYYCARDYGDYGMDYWGQGTTVTVSSGGGGSGGGGSGGGGSGDIVMTQSPDSLAVSLGERATINCRASKSVSTSGYSFMHWYQQKPGQPPKLLIYLASNLESGVPDRFSGSGSGTDFTLTISSLQAEDVAVYYCQHSREVPWTFGQGTKVEIKESKYGPPCPSCPAPEFEGGPSVFLFPPKPKDTLMISRTPEVTCVVVDVSQEDPEVQFNWYVDGVEVHNAKTKPREEQFQSTYRVVSVLTVLHQDWLNGKEYKCKVSNKGLPSSIEKTISKAKGQPREPQVYTLPPSQEEMTKNQVSLTCLVKGFYPSDIAVEWESNGQPENNYKTTPPVLDSDGSFFLYSRLTVDKSRWQEGNVFSCSVMHEALHNHYTQKSLSLSLGKIYIWAPLAGTCGVLLLSLVITLYCNHRNRKRGRKKLLYIFKQPFMRPVQTTQEEDGCSCRFPEEEEGGCELRVKFSRSADAPAYQQGQNQLYNELNLGRREEYDVLDKRRGRDPEMGGKPRRKNPQEGLYNELQKDKMAEAYSEIGMKGERRRGKGHDGLYQGLSTATKDTYDALHMQALPPR

SEQ ID NO: 2748 - protein, 657 aa, Artificial Sequence
  CAT-CD70-293 (without signal peptide)
QVQLVQSGAEVKKPGASVKVSCKASGYTFTNYGMNWVRQAPGQGLKWMGWINTYTGEPTYADAFKGRVTMTRDTSISTAYMELSRLRSDDTAVYYCARDYGDYGMDYWGQGTTVTVSSGGGGSGGGGSGGGGSGDIVMTQSPDSLAVSLGERATINCRASKSVSTSGYSFMHWYQQKPGQPPKLLIYLASNLESGVPDRFSGSGSGTDFTLTISSLQAEDVAVYYCQHSREVPWTFGQGTKVEIKESKYGPPCPSCPAPEFEGGPSVFLFPPKPKDTLMISRTPEVTCVVVDVSQEDPEVQFNWYVDGVEVHNAKTKPREEQFQSTYRVVSVLTVLHQDWLNGKEYKCKVSNKGLPSSIEKTISKAKGQPREPQVYTLPPSQEEMTKNQVSLTCLVKGFYPSDIAVEWESNGQPENNYKTTPPVLDSDGSFFLYSRLTVDKSRWQEGNVFSCSVMHEALHNHYTQKSLSLSLGKIYIWAPLAGTCGVLLLSLVITLYCNHRNRKRGRKKLLYIFKQPFMRPVQTTQEEDGCSCRFPEEEEGGCELRVKFSRSADAPAYQQGQNQLYNELNLGRREEYDVLDKRRGRDPEMGGKPRRKNPQEGLYNELQKDKMAEAYSEIGMKGERRRGKGHDGLYQGLSTATKDTYDALHMQALPPR

SEQ ID NO: 2749 - protein, 475 aa, Artificial Sequence
  CAT-CD70-294
MALPVTALLLPLALLLHAARPQVQLVQSGAEVKKPGASVKVSCKASGYTFTNYGMNWVRQAPGQGLKWMGWINTYTGEPTYADAFKGRVTMTRDTSISTAYMELSRLRSDDTAVYYCARDYGDYGMDYWGQGTTVTVSSGGGGSGGGGSGGGGSGDIVMTQSPDSLAVSLGERATINCRASKSVSTSGYSFMHWYQQKPGQPPKLLIYLASNLESGVPDRFSGSGSGTDFTLTISSLQAEDVAVYYCQHSREVPWTFGQGTKVEIKTTTPAPRPPTPAPTIASQPLSLRPEACRPAAGGAVHTRGLDFACDIYIWAPLAGTCGVLLLSLVITLYCNHRNLCARPRRSPAQEDGKVYINMPGRGRVKFSRSADAPAYQQGQNQLYNELNLGRREEYDVLDKRRGRDPEMGGKPRRKNPQEGLYNELQKDKMAEAYSEIGMKGERRRGKGHDGLYQGLSTATKDTYDALHMQALPPR

SEQ ID NO: 2750 - protein, 454 aa, Artificial Sequence
  CAT-CD70-294 (without signal peptide)
QVQLVQSGAEVKKPGASVKVSCKASGYTFTNYGMNWVRQAPGQGLKWMGWINTYTGEPTYADAFKGRVTMTRDTSISTAYMELSRLRSDDTAVYYCARDYGDYGMDYWGQGTTVTVSSGGGGSGGGGSGGGGSGDIVMTQSPDSLAVSLGERATINCRASKSVSTSGYSFMHWYQQKPGQPPKLLIYLASNLESGVPDRFSGSGSGTDFTLTISSLQAEDVAVYYCQHSREVPWTFGQGTKVEIKTTTPAPRPPTPAPTIASQPLSLRPEACRPAAGGAVHTRGLDFACDIYIWAPLAGTCGVLLLSLVITLYCNHRNLCARPRRSPAQEDGKVYINMPGRGRVKFSRSADAPAYQQGQNQLYNELNLGRREEYDVLDKRRGRDPEMGGKPRRKNPQEGLYNELQKDKMAEAYSEIGMKGERRRGKGHDGLYQGLSTATKDTYDALHMQALPPR

SEQ ID NO: 2751 - protein, 449 aa, Artificial Sequence
  CAT-CD70-295
MALPVTALLLPLALLLHAARPQVQLVQSGAEVKKPGASVKVSCKASGYTFTNYGMNWVRQAPGQGLKWMGWINTYTGEPTYADAFKGRVTMTRDTSISTAYMELSRLRSDDTAVYYCARDYGDYGMDYWGQGTTVTVSSGGGGSGGGGSGGGGSGDIVMTQSPDSLAVSLGERATINCRASKSVSTSGYSFMHWYQQKPGQPPKLLIYLASNLESGVPDRFSGSGSGTDFTLTISSLQAEDVAVYYCQHSREVPWTFGQGTKVEIKAEPKSPDKTHTCPPCPKDPIYIWAPLAGTCGVLLLSLVITLYCNHRNLCARPRRSPAQEDGKVYINMPGRGRVKFSRSADAPAYQQGQNQLYNELNLGRREEYDVLDKRRGRDPEMGGKPRRKNPQEGLYNELQKDKMAEAYSEIGMKGERRRGKGHDGLYQGLSTATKDTYDALHMQALPPR

SEQ ID NO: 2752 - protein, 428 aa, Artificial Sequence
  CAT-CD70-295 (without signal peptide)
QVQLVQSGAEVKKPGASVKVSCKASGYTFTNYGMNWVRQAPGQGLKWMGWINTYTGEPTYADAFKGRVTMTRDTSISTAYMELSRLRSDDTAVYYCARDYGDYGMDYWGQGTTVTVSSGGGGSGGGGSGGGGSGDIVMTQSPDSLAVSLGERATINCRASKSVSTSGYSFMHWYQQKPGQPPKLLIYLASNLESGVPDRFSGSGSGTDFTLTISSLQAEDVAVYYCQHSREVPWTFGQGTKVEIKAEPKSPDKTHTCPPCPKDPIYIWAPLAGTCGVLLLSLVITLYCNHRNLCARPRRSPAQEDGKVYINMPGRGRVKFSRSADAPAYQQGQNQLYNELNLGRREEYDVLDKRRGRDPEMGGKPRRKNPQEGLYNELQKDKMAEAYSEIGMKGERRRGKGHDGLYQGLSTATKDTYDALHMQALPPR

SEQ ID NO: 2753 - protein, 442 aa, Artificial Sequence
  CAT-CD70-296
MALPVTALLLPLALLLHAARPQVQLVQSGAEVKKPGASVKVSCKASGYTFTNYGMNWVRQAPGQGLKWMGWINTYTGEPTYADAFKGRVTMTRDTSISTAYMELSRLRSDDTAVYYCARDYGDYGMDYWGQGTTVTVSSGGGGSGGGGSGGGGSGDIVMTQSPDSLAVSLGERATINCRASKSVSTSGYSFMHWYQQKPGQPPKLLIYLASNLESGVPDRFSGSGSGTDFTLTISSLQAEDVAVYYCQHSREVPWTFGQGTKVEIKESKYGPPCPSCPIYIWAPLAGTCGVLLLSLVITLYCNHRNLCARPRRSPAQEDGKVYINMPGRGRVKFSRSADAPAYQQGQNQLYNELNLGRREEYDVLDKRRGRDPEMGGKPRRKNPQEGLYNELQKDKMAEAYSEIGMKGERRRGKGHDGLYQGLSTATKDTYDALHMQALPPR

SEQ ID NO: 2754 - protein, 421 aa, Artificial Sequence
  CAT-CD70-296 (without signal peptide)
QVQLVQSGAEVKKPGASVKVSCKASGYTFTNYGMNWVRQAPGQGLKWMGWINTYTGEPTYADAFKGRVTMTRDTSISTAYMELSRLRSDDTAVYYCARDYGDYGMDYWGQGTTVTVSSGGGGSGGGGSGGGGSGDIVMTQSPDSLAVSLGERATINCRASKSVSTSGYSFMHWYQQKPGQPPKLLIYLASNLESGVPDRFSGSGSGTDFTLTISSLQAEDVAVYYCQHSREVPWTFGQGTKVEIKESKYGPPCPSCPIYIWAPLAGTCGVLLLSLVITLYCNHRNLCARPRRSPAQEDGKVYINMPGRGRVKFSRSADAPAYQQGQNQLYNELNLGRREEYDVLDKRRGRDPEMGGKPRRKNPQEGLYNELQKDKMAEAYSEIGMKGERRRGKGHDGLYQGLSTATKDTYDALHMQALPPR

SEQ ID NO: 2755 - protein, 549 aa, Artificial Sequence
  CAT-CD70-297
MALPVTALLLPLALLLHAARPQVQLVQSGAEVKKPGASVKVSCKASGYTFTNYGMNWVRQAPGQGLKWMGWINTYTGEPTYADAFKGRVTMTRDTSISTAYMELSRLRSDDTAVYYCARDYGDYGMDYWGQGTTVTVSSGGGGSGGGGSGGGGSGDIVMTQSPDSLAVSLGERATINCRASKSVSTSGYSFMHWYQQKPGQPPKLLIYLASNLESGVPDRFSGSGSGTDFTLTISSLQAEDVAVYYCQHSREVPWTFGQGTKVEIKESKYGPPCPSCPGQPREPQVYTLPPSQEEMTKNQVSLTCLVKGFYPSDIAVEWESNGQPENNYKTTPPVLDSDGSFFLYSRLTVDKSRWQEGNVFSCSVMHEALHNHYTQKSLSLSLGKIYIWAPLAGTCGVLLLSLVITLYCNHRNLCARPRRSPAQEDGKVYINMPGRGRVKFSRSADAPAYQQGQNQLYNELNLGRREEYDVLDKRRGRDPEMGGKPRRKNPQEGLYNELQKDKMAEAYSEIGMKGERRRGKGHDGLYQGLSTATKDTYDALHMQALPPR

SEQ ID NO: 2756 - protein, 528 aa, Artificial Sequence
  CAT-CD70-297 (without signal peptide)
QVQLVQSGAEVKKPGASVKVSCKASGYTFTNYGMNWVRQAPGQGLKWMGWINTYTGEPTYADAFKGRVTMTRDTSISTAYMELSRLRSDDTAVYYCARDYGDYGMDYWGQGTTVTVSSGGGGSGGGGSGGGGSGDIVMTQSPDSLAVSLGERATINCRASKSVSTSGYSFMHWYQQKPGQPPKLLIYLASNLESGVPDRFSGSGSGTDFTLTISSLQAEDVAVYYCQHSREVPWTFGQGTKVEIKESKYGPPCPSCPGQPREPQVYTLPPSQEEMTKNQVSLTCLVKGFYPSDIAVEWESNGQPENNYKTTPPVLDSDGSFFLYSRLTVDKSRWQEGNVFSCSVMHEALHNHYTQKSLSLSLGKIYIWAPLAGTCGVLLLSLVITLYCNHRNLCARPRRSPAQEDGKVYINMPGRGRVKFSRSADAPAYQQGQNQLYNELNLGRREEYDVLDKRRGRDPEMGGKPRRKNPQEGLYNELQKDKMAEAYSEIGMKGERRRGKGHDGLYQGLSTATKDTYDALHMQALPPR

SEQ ID NO: 2757 - protein, 659 aa, Artificial Sequence
  CAT-CD70-298
MALPVTALLLPLALLLHAARPQVQLVQSGAEVKKPGASVKVSCKASGYTFTNYGMNWVRQAPGQGLKWMGWINTYTGEPTYADAFKGRVTMTRDTSISTAYMELSRLRSDDTAVYYCARDYGDYGMDYWGQGTTVTVSSGGGGSGGGGSGGGGSGDIVMTQSPDSLAVSLGERATINCRASKSVSTSGYSFMHWYQQKPGQPPKLLIYLASNLESGVPDRFSGSGSGTDFTLTISSLQAEDVAVYYCQHSREVPWTFGQGTKVEIKESKYGPPCPSCPAPEFLGGPSVFLFPPKPKDTLMISRTPEVTCVVVDVSQEDPEVQFNWYVDGVEVHNAKTKPREEQFNSTYRVVSVLTVLHQDWLNGKEYKCKVSNKGLPSSIEKTISKAKGQPREPQVYTLPPSQEEMTKNQVSLTCLVKGFYPSDIAVEWESNGQPENNYKTTPPVLDSDGSFFLYSRLTVDKSRWQEGNVFSCSVMHEALHNHYTQKSLSLSLGKIYIWAPLAGTCGVLLLSLVITLYCNHRNLCARPRRSPAQEDGKVYINMPGRGRVKFSRSADAPAYQQGQNQLYNELNLGRREEYDVLDKRRGRDPEMGGKPRRKNPQEGLYNELQKDKMAEAYSEIGMKGERRRGKGHDGLYQGLSTATKDTYDALHMQALPPR

SEQ ID NO: 2758 - protein, 638 aa, Artificial Sequence
  CAT-CD70-298 (without signal peptide)
QVQLVQSGAEVKKPGASVKVSCKASGYTFTNYGMNWVRQAPGQGLKWMGWINTYTGEPTYADAFKGRVTMTRDTSISTAYMELSRLRSDDTAVYYCARDYGDYGMDYWGQGTTVTVSSGGGGSGGGGSGGGGSGDIVMTQSPDSLAVSLGERATINCRASKSVSTSGYSFMHWYQQKPGQPPKLLIYLASNLESGVPDRFSGSGSGTDFTLTISSLQAEDVAVYYCQHSREVPWTFGQGTKVEIKESKYGPPCPSCPAPEFLGGPSVFLFPPKPKDTLMISRTPEVTCVVVDVSQEDPEVQFNWYVDGVEVHNAKTKPREEQFNSTYRVVSVLTVLHQDWLNGKEYKCKVSNKGLPSSIEKTISKAKGQPREPQVYTLPPSQEEMTKNQVSLTCLVKGFYPSDIAVEWESNGQPENNYKTTPPVLDSDGSFFLYSRLTVDKSRWQEGNVFSCSVMHEALHNHYTQKSLSLSLGKIYIWAPLAGTCGVLLLSLVITLYCNHRNLCARPRRSPAQEDGKVYINMPGRGRVKFSRSADAPAYQQGQNQLYNELNLGRREEYDVLDKRRGRDPEMGGKPRRKNPQEGLYNELQKDKMAEAYSEIGMKGERRRGKGHDGLYQGLSTATKDTYDALHMQALPPR

SEQ ID NO: 2759 - protein, 659 aa, Artificial Sequence
  CAT-CD70-299
MALPVTALLLPLALLLHAARPQVQLVQSGAEVKKPGASVKVSCKASGYTFTNYGMNWVRQAPGQGLKWMGWINTYTGEPTYADAFKGRVTMTRDTSISTAYMELSRLRSDDTAVYYCARDYGDYGMDYWGQGTTVTVSSGGGGSGGGGSGGGGSGDIVMTQSPDSLAVSLGERATINCRASKSVSTSGYSFMHWYQQKPGQPPKLLIYLASNLESGVPDRFSGSGSGTDFTLTISSLQAEDVAVYYCQHSREVPWTFGQGTKVEIKESKYGPPCPSCPAPEFEGGPSVFLFPPKPKDTLMISRTPEVTCVVVDVSQEDPEVQFNWYVDGVEVHNAKTKPREEQFQSTYRVVSVLTVLHQDWLNGKEYKCKVSNKGLPSSIEKTISKAKGQPREPQVYTLPPSQEEMTKNQVSLTCLVKGFYPSDIAVEWESNGQPENNYKTTPPVLDSDGSFFLYSRLTVDKSRWQEGNVFSCSVMHEALHNHYTQKSLSLSLGKIYIWAPLAGTCGVLLLSLVITLYCNHRNLCARPRRSPAQEDGKVYINMPGRGRVKFSRSADAPAYQQGQNQLYNELNLGRREEYDVLDKRRGRDPEMGGKPRRKNPQEGLYNELQKDKMAEAYSEIGMKGERRRGKGHDGLYQGLSTATKDTYDALHMQALPPR

SEQ ID NO: 2760 - protein, 638 aa, Artificial Sequence
  CAT-CD70-299 (without signal peptide)
QVQLVQSGAEVKKPGASVKVSCKASGYTFTNYGMNWVRQAPGQGLKWMGWINTYTGEPTYADAFKGRVTMTRDTSISTAYMELSRLRSDDTAVYYCARDYGDYGMDYWGQGTTVTVSSGGGGSGGGGSGGGGSGDIVMTQSPDSLAVSLGERATINCRASKSVSTSGYSFMHWYQQKPGQPPKLLIYLASNLESGVPDRFSGSGSGTDFTLTISSLQAEDVAVYYCQHSREVPWTFGQGTKVEIKESKYGPPCPSCPAPEFEGGPSVFLFPPKPKDTLMISRTPEVTCVVVDVSQEDPEVQFNWYVDGVEVHNAKTKPREEQFQSTYRVVSVLTVLHQDWLNGKEYKCKVSNKGLPSSIEKTISKAKGQPREPQVYTLPPSQEEMTKNQVSLTCLVKGFYPSDIAVEWESNGQPENNYKTTPPVLDSDGSFFLYSRLTVDKSRWQEGNVFSCSVMHEALHNHYTQKSLSLSLGKIYIWAPLAGTCGVLLLSLVITLYCNHRNLCARPRRSPAQEDGKVYINMPGRGRVKFSRSADAPAYQQGQNQLYNELNLGRREEYDVLDKRRGRDPEMGGKPRRKNPQEGLYNELQKDKMAEAYSEIGMKGERRRGKGHDGLYQGLSTATKDTYDALHMQALPPR

SEQ ID NO: 2761 - protein, 493 aa, Artificial Sequence
  CAT-CD70-300
MALPVTALLLPLALLLHAARPQVQLVQSGAEVKKPGASVKVSCKASGYTFTNYGMNWVRQAPGQGLKWMGWINTYTGEPTYADAFKGRVTMTRDTSISTAYMELSRLRSDDTAVYYCARDYGDYGMDYWGQGTTVTVSSGGGGSGGGGSGGGGSGDIVMTQSPDSLAVSLGERATINCRASKSVSTSGYSFMHWYQQKPGQPPKLLIYLASNLESGVPDRFSGSGSGTDFTLTISSLQAEDVAVYYCQHSREVPWTFGQGTKVEIKTTTPAPRPPTPAPTIASQPLSLRPEACRPAAGGAVHTRGLDFACDIYIWAPLAGTCGVLLLSLVITLYCNHRNALYLLRRDQRLPPDAHKPPGGGSFRTPIQEEQADAHSTLAKIRVKFSRSADAPAYQQGQNQLYNELNLGRREEYDVLDKRRGRDPEMGGKPRRKNPQEGLYNELQKDKMAEAYSEIGMKGERRRGKGHDGLYQGLSTATKDTYDALHMQALPPR

SEQ ID NO: 2762 - protein, 472 aa, Artificial Sequence
  CAT-CD70-300 (without signal peptide)
QVQLVQSGAEVKKPGASVKVSCKASGYTFTNYGMNWVRQAPGQGLKWMGWINTYTGEPTYADAFKGRVTMTRDTSISTAYMELSRLRSDDTAVYYCARDYGDYGMDYWGQGTTVTVSSGGGGSGGGGSGGGGSGDIVMTQSPDSLAVSLGERATINCRASKSVSTSGYSFMHWYQQKPGQPPKLLIYLASNLESGVPDRFSGSGSGTDFTLTISSLQAEDVAVYYCQHSREVPWTFGQGTKVEIKTTTPAPRPPTPAPTIASQPLSLRPEACRPAAGGAVHTRGLDFACDIYIWAPLAGTCGVLLLSLVITLYCNHRNALYLLRRDQRLPPDAHKPPGGGSFRTPIQEEQADAHSTLAKIRVKFSRSADAPAYQQGQNQLYNELNLGRREEYDVLDKRRGRDPEMGGKPRRKNPQEGLYNELQKDKMAEAYSEIGMKGERRRGKGHDGLYQGLSTATKDTYDALHMQALPPR

SEQ ID NO: 2763 - protein, 467 aa, Artificial Sequence
  CAT-CD70-301
MALPVTALLLPLALLLHAARPQVQLVQSGAEVKKPGASVKVSCKASGYTFTNYGMNWVRQAPGQGLKWMGWINTYTGEPTYADAFKGRVTMTRDTSISTAYMELSRLRSDDTAVYYCARDYGDYGMDYWGQGTTVTVSSGGGGSGGGGSGGGGSGDIVMTQSPDSLAVSLGERATINCRASKSVSTSGYSFMHWYQQKPGQPPKLLIYLASNLESGVPDRFSGSGSGTDFTLTISSLQAEDVAVYYCQHSREVPWTFGQGTKVEIKAEPKSPDKTHTCPPCPKDPIYIWAPLAGTCGVLLLSLVITLYCNHRNALYLLRRDQRLPPDAHKPPGGGSFRTPIQEEQADAHSTLAKIRVKFSRSADAPAYQQGQNQLYNELNLGRREEYDVLDKRRGRDPEMGGKPRRKNPQEGLYNELQKDKMAEAYSEIGMKGERRRGKGHDGLYQGLSTATKDTYDALHMQALPPR

SEQ ID NO: 2764 - protein, 446 aa, Artificial Sequence
  CAT-CD70-301 (without signal peptide)
QVQLVQSGAEVKKPGASVKVSCKASGYTFTNYGMNWVRQAPGQGLKWMGWINTYTGEPTYADAFKGRVTMTRDTSISTAYMELSRLRSDDTAVYYCARDYGDYGMDYWGQGTTVTVSSGGGGSGGGGSGGGGSGDIVMTQSPDSLAVSLGERATINCRASKSVSTSGYSFMHWYQQKPGQPPKLLIYLASNLESGVPDRFSGSGSGTDFTLTISSLQAEDVAVYYCQHSREVPWTFGQGTKVEIKAEPKSPDKTHTCPPCPKDPIYIWAPLAGTCGVLLLSLVITLYCNHRNALYLLRRDQRLPPDAHKPPGGGSFRTPIQEEQADAHSTLAKIRVKFSRSADAPAYQQGQNQLYNELNLGRREEYDVLDKRRGRDPEMGGKPRRKNPQEGLYNELQKDKMAEAYSEIGMKGERRRGKGHDGLYQGLSTATKDTYDALHMQALPPR

SEQ ID NO: 2765 - protein, 460 aa, Artificial Sequence
  CAT-CD70-302
MALPVTALLLPLALLLHAARPQVQLVQSGAEVKKPGASVKVSCKASGYTFTNYGMNWVRQAPGQGLKWMGWINTYTGEPTYADAFKGRVTMTRDTSISTAYMELSRLRSDDTAVYYCARDYGDYGMDYWGQGTTVTVSSGGGGSGGGGSGGGGSGDIVMTQSPDSLAVSLGERATINCRASKSVSTSGYSFMHWYQQKPGQPPKLLIYLASNLESGVPDRFSGSGSGTDFTLTISSLQAEDVAVYYCQHSREVPWTFGQGTKVEIKESKYGPPCPSCPIYIWAPLAGTCGVLLLSLVITLYCNHRNALYLLRRDQRLPPDAHKPPGGGSFRTPIQEEQADAHSTLAKIRVKFSRSADAPAYQQGQNQLYNELNLGRREEYDVLDKRRGRDPEMGGKPRRKNPQEGLYNELQKDKMAEAYSEIGMKGERRRGKGHDGLYQGLSTATKDTYDALHMQALPPR

SEQ ID NO: 2766 - protein, 439 aa, Artificial Sequence
  CAT-CD70-302 (without signal peptide)
QVQLVQSGAEVKKPGASVKVSCKASGYTFTNYGMNWVRQAPGQGLKWMGWINTYTGEPTYADAFKGRVTMTRDTSISTAYMELSRLRSDDTAVYYCARDYGDYGMDYWGQGTTVTVSSGGGGSGGGGSGGGGSGDIVMTQSPDSLAVSLGERATINCRASKSVSTSGYSFMHWYQQKPGQPPKLLIYLASNLESGVPDRFSGSGSGTDFTLTISSLQAEDVAVYYCQHSREVPWTFGQGTKVEIKESKYGPPCPSCPIYIWAPLAGTCGVLLLSLVITLYCNHRNALYLLRRDQRLPPDAHKPPGGGSFRTPIQEEQADAHSTLAKIRVKFSRSADAPAYQQGQNQLYNELNLGRREEYDVLDKRRGRDPEMGGKPRRKNPQEGLYNELQKDKMAEAYSEIGMKGERRRGKGHDGLYQGLSTATKDTYDALHMQALPPR

SEQ ID NO: 2767 - protein, 567 aa, Artificial Sequence
  CAT-CD70-303
MALPVTALLLPLALLLHAARPQVQLVQSGAEVKKPGASVKVSCKASGYTFTNYGMNWVRQAPGQGLKWMGWINTYTGEPTYADAFKGRVTMTRDTSISTAYMELSRLRSDDTAVYYCARDYGDYGMDYWGQGTTVTVSSGGGGSGGGGSGGGGSGDIVMTQSPDSLAVSLGERATINCRASKSVSTSGYSFMHWYQQKPGQPPKLLIYLASNLESGVPDRFSGSGSGTDFTLTISSLQAEDVAVYYCQHSREVPWTFGQGTKVEIKESKYGPPCPSCPGQPREPQVYTLPPSQEEMTKNQVSLTCLVKGFYPSDIAVEWESNGQPENNYKTTPPVLDSDGSFFLYSRLTVDKSRWQEGNVFSCSVMHEALHNHYTQKSLSLSLGKIYIWAPLAGTCGVLLLSLVITLYCNHRNALYLLRRDQRLPPDAHKPPGGGSFRTPIQEEQADAHSTLAKIRVKFSRSADAPAYQQGQNQLYNELNLGRREEYDVLDKRRGRDPEMGGKPRRKNPQEGLYNELQKDKMAEAYSEIGMKGERRRGKGHDGLYQGLSTATKDTYDALHMQALPPR

SEQ ID NO: 2768 - protein, 546 aa, Artificial Sequence
  CAT-CD70-303 (without signal peptide)
QVQLVQSGAEVKKPGASVKVSCKASGYTFTNYGMNWVRQAPGQGLKWMGWINTYTGEPTYADAFKGRVTMTRDTSISTAYMELSRLRSDDTAVYYCARDYGDYGMDYWGQGTTVTVSSGGGGSGGGGSGGGGSGDIVMTQSPDSLAVSLGERATINCRASKSVSTSGYSFMHWYQQKPGQPPKLLIYLASNLESGVPDRFSGSGSGTDFTLTISSLQAEDVAVYYCQHSREVPWTFGQGTKVEIKESKYGPPCPSCPGQPREPQVYTLPPSQEEMTKNQVSLTCLVKGFYPSDIAVEWESNGQPENNYKTTPPVLDSDGSFFLYSRLTVDKSRWQEGNVFSCSVMHEALHNHYTQKSLSLSLGKIYIWAPLAGTCGVLLLSLVITLYCNHRNALYLLRRDQRLPPDAHKPPGGGSFRTPIQEEQADAHSTLAKIRVKFSRSADAPAYQQGQNQLYNELNLGRREEYDVLDKRRGRDPEMGGKPRRKNPQEGLYNELQKDKMAEAYSEIGMKGERRRGKGHDGLYQGLSTATKDTYDALHMQALPPR

SEQ ID NO: 2769 - protein, 677 aa, Artificial Sequence
  CAT-CD70-304
MALPVTALLLPLALLLHAARPQVQLVQSGAEVKKPGASVKVSCKASGYTFTNYGMNWVRQAPGQGLKWMGWINTYTGEPTYADAFKGRVTMTRDTSISTAYMELSRLRSDDTAVYYCARDYGDYGMDYWGQGTTVTVSSGGGGSGGGGSGGGGSGDIVMTQSPDSLAVSLGERATINCRASKSVSTSGYSFMHWYQQKPGQPPKLLIYLASNLESGVPDRFSGSGSGTDFTLTISSLQAEDVAVYYCQHSREVPWTFGQGTKVEIKESKYGPPCPSCPAPEFLGGPSVFLFPPKPKDTLMISRTPEVTCVVVDVSQEDPEVQFNWYVDGVEVHNAKTKPREEQFNSTYRVVSVLTVLHQDWLNGKEYKCKVSNKGLPSSIEKTISKAKGQPREPQVYTLPPSQEEMTKNQVSLTCLVKGFYPSDIAVEWESNGQPENNYKTTPPVLDSDGSFFLYSRLTVDKSRWQEGNVFSCSVMHEALHNHYTQKSLSLSLGKIYIWAPLAGTCGVLLLSLVITLYCNHRNALYLLRRDQRLPPDAHKPPGGGSFRTPIQEEQADAHSTLAKIRVKFSRSADAPAYQQGQNQLYNELNLGRREEYDVLDKRRGRDPEMGGKPRRKNPQEGLYNELQKDKMAEAYSEIGMKGERRRGKGHDGLYQGLSTATKDTYDALHMQALPPR

SEQ ID NO: 2770 - protein, 656 aa, Artificial Sequence
  CAT-CD70-304 (without signal peptide)
QVQLVQSGAEVKKPGASVKVSCKASGYTFTNYGMNWVRQAPGQGLKWMGWINTYTGEPTYADAFKGRVTMTRDTSISTAYMELSRLRSDDTAVYYCARDYGDYGMDYWGQGTTVTVSSGGGGSGGGGSGGGGSGDIVMTQSPDSLAVSLGERATINCRASKSVSTSGYSFMHWYQQKPGQPPKLLIYLASNLESGVPDRFSGSGSGTDFTLTISSLQAEDVAVYYCQHSREVPWTFGQGTKVEIKESKYGPPCPSCPAPEFLGGPSVFLFPPKPKDTLMISRTPEVTCVVVDVSQEDPEVQFNWYVDGVEVHNAKTKPREEQFNSTYRVVSVLTVLHQDWLNGKEYKCKVSNKGLPSSIEKTISKAKGQPREPQVYTLPPSQEEMTKNQVSLTCLVKGFYPSDIAVEWESNGQPENNYKTTPPVLDSDGSFFLYSRLTVDKSRWQEGNVFSCSVMHEALHNHYTQKSLSLSLGKIYIWAPLAGTCGVLLLSLVITLYCNHRNALYLLRRDQRLPPDAHKPPGGGSFRTPIQEEQADAHSTLAKIRVKFSRSADAPAYQQGQNQLYNELNLGRREEYDVLDKRRGRDPEMGGKPRRKNPQEGLYNELQKDKMAEAYSEIGMKGERRRGKGHDGLYQGLSTATKDTYDALHMQALPPR

SEQ ID NO: 2771 - protein, 677 aa, Artificial Sequence
  CAT-CD70-305
MALPVTALLLPLALLLHAARPQVQLVQSGAEVKKPGASVKVSCKASGYTFTNYGMNWVRQAPGQGLKWMGWINTYTGEPTYADAFKGRVTMTRDTSISTAYMELSRLRSDDTAVYYCARDYGDYGMDYWGQGTTVTVSSGGGGSGGGGSGGGGSGDIVMTQSPDSLAVSLGERATINCRASKSVSTSGYSFMHWYQQKPGQPPKLLIYLASNLESGVPDRFSGSGSGTDFTLTISSLQAEDVAVYYCQHSREVPWTFGQGTKVEIKESKYGPPCPSCPAPEFEGGPSVFLFPPKPKDTLMISRTPEVTCVVVDVSQEDPEVQFNWYVDGVEVHNAKTKPREEQFQSTYRVVSVLTVLHQDWLNGKEYKCKVSNKGLPSSIEKTISKAKGQPREPQVYTLPPSQEEMTKNQVSLTCLVKGFYPSDIAVEWESNGQPENNYKTTPPVLDSDGSFFLYSRLTVDKSRWQEGNVFSCSVMHEALHNHYTQKSLSLSLGKIYIWAPLAGTCGVLLLSLVITLYCNHRNALYLLRRDQRLPPDAHKPPGGGSFRTPIQEEQADAHSTLAKIRVKFSRSADAPAYQQGQNQLYNELNLGRREEYDVLDKRRGRDPEMGGKPRRKNPQEGLYNELQKDKMAEAYSEIGMKGERRRGKGHDGLYQGLSTATKDTYDALHMQALPPR

SEQ ID NO: 2772 - protein, 656 aa, Artificial Sequence
  CAT-CD70-305 (without signal peptide)
QVQLVQSGAEVKKPGASVKVSCKASGYTFTNYGMNWVRQAPGQGLKWMGWINTYTGEPTYADAFKGRVTMTRDTSISTAYMELSRLRSDDTAVYYCARDYGDYGMDYWGQGTTVTVSSGGGGSGGGGSGGGGSGDIVMTQSPDSLAVSLGERATINCRASKSVSTSGYSFMHWYQQKPGQPPKLLIYLASNLESGVPDRFSGSGSGTDFTLTISSLQAEDVAVYYCQHSREVPWTFGQGTKVEIKESKYGPPCPSCPAPEFEGGPSVFLFPPKPKDTLMISRTPEVTCVVVDVSQEDPEVQFNWYVDGVEVHNAKTKPREEQFQSTYRVVSVLTVLHQDWLNGKEYKCKVSNKGLPSSIEKTISKAKGQPREPQVYTLPPSQEEMTKNQVSLTCLVKGFYPSDIAVEWESNGQPENNYKTTPPVLDSDGSFFLYSRLTVDKSRWQEGNVFSCSVMHEALHNHYTQKSLSLSLGKIYIWAPLAGTCGVLLLSLVITLYCNHRNALYLLRRDQRLPPDAHKPPGGGSFRTPIQEEQADAHSTLAKIRVKFSRSADAPAYQQGQNQLYNELNLGRREEYDVLDKRRGRDPEMGGKPRRKNPQEGLYNELQKDKMAEAYSEIGMKGERRRGKGHDGLYQGLSTATKDTYDALHMQALPPR

SEQ ID NO: 2773 - protein, 431 aa, Artificial Sequence
  CAT-CD70-306
MALPVTALLLPLALLLHAARPQVQLVQSGAEVKKPGASVKVSCKASGYTFTNYGMNWVRQAPGQGLKWMGWINTYTGEPTYADAFKGRVTMTRDTSISTAYMELSRLRSDDTAVYYCARDYGDYGMDYWGQGTTVTVSSGGGGSGGGGSGGGGSGDIVMTQSPDSLAVSLGERATINCRASKSVSTSGYSFMHWYQQKPGQPPKLLIYLASNLESGVPDRFSGSGSGTDFTLTISSLQAEDVAVYYCQHSREVPWTFGQGTKVEIKTTTPAPRPPTPAPTIASQPLSLRPEACRPAAGGAVHTRGLDFACDFWVLVVVGGVLACYSLLVTVAFIIFWVRSKRSRLLHSDYMNMTPRRPGPTRKHYQPYAPPRDFAAYRSYFLGRLVPRGRGAAEAATRKQRITETESPYQELQGQRSDVYSDLNTQRPYYK

SEQ ID NO: 2774 - protein, 410 aa, Artificial Sequence
  CAT-CD70-306 (without signal peptide)
QVQLVQSGAEVKKPGASVKVSCKASGYTFTNYGMNWVRQAPGQGLKWMGWINTYTGEPTYADAFKGRVTMTRDTSISTAYMELSRLRSDDTAVYYCARDYGDYGMDYWGQGTTVTVSSGGGGSGGGGSGGGGSGDIVMTQSPDSLAVSLGERATINCRASKSVSTSGYSFMHWYQQKPGQPPKLLIYLASNLESGVPDRFSGSGSGTDFTLTISSLQAEDVAVYYCQHSREVPWTFGQGTKVEIKTTTPAPRPPTPAPTIASQPLSLRPEACRPAAGGAVHTRGLDFACDFWVLVVVGGVLACYSLLVTVAFIIFWVRSKRSRLLHSDYMNMTPRRPGPTRKHYQPYAPPRDFAAYRSYFLGRLVPRGRGAAEAATRKQRITETESPYQELQGQRSDVYSDLNTQRPYYK

SEQ ID NO: 2775 - protein, 405 aa, Artificial Sequence
  CAT-CD70-307
MALPVTALLLPLALLLHAARPQVQLVQSGAEVKKPGASVKVSCKASGYTFTNYGMNWVRQAPGQGLKWMGWINTYTGEPTYADAFKGRVTMTRDTSISTAYMELSRLRSDDTAVYYCARDYGDYGMDYWGQGTTVTVSSGGGGSGGGGSGGGGSGDIVMTQSPDSLAVSLGERATINCRASKSVSTSGYSFMHWYQQKPGQPPKLLIYLASNLESGVPDRFSGSGSGTDFTLTISSLQAEDVAVYYCQHSREVPWTFGQGTKVEIKAEPKSPDKTHTCPPCPKDPFWVLVVVGGVLACYSLLVTVAFIIFWVRSKRSRLLHSDYMNMTPRRPGPTRKHYQPYAPPRDFAAYRSYFLGRLVPRGRGAAEAATRKQRITETESPYQELQGQRSDVYSDLNTQRPYYK

SEQ ID NO: 2776 - protein, 384 aa, Artificial Sequence
  CAT-CD70-307 (without signal peptide)
QVQLVQSGAEVKKPGASVKVSCKASGYTFTNYGMNWVRQAPGQGLKWMGWINTYTGEPTYADAFKGRVTMTRDTSISTAYMELSRLRSDDTAVYYCARDYGDYGMDYWGQGTTVTVSSGGGGSGGGGSGGGGSGDIVMTQSPDSLAVSLGERATINCRASKSVSTSGYSFMHWYQQKPGQPPKLLIYLASNLESGVPDRFSGSGSGTDFTLTISSLQAEDVAVYYCQHSREVPWTFGQGTKVEIKAEPKSPDKTHTCPPCPKDPFWVLVVVGGVLACYSLLVTVAFIIFWVRSKRSRLLHSDYMNMTPRRPGPTRKHYQPYAPPRDFAAYRSYFLGRLVPRGRGAAEAATRKQRITETESPYQELQGQRSDVYSDLNTQRPYYK

SEQ ID NO: 2777 - protein, 398 aa, Artificial Sequence
  CAT-CD70-308
MALPVTALLLPLALLLHAARPQVQLVQSGAEVKKPGASVKVSCKASGYTFTNYGMNWVRQAPGQGLKWMGWINTYTGEPTYADAFKGRVTMTRDTSISTAYMELSRLRSDDTAVYYCARDYGDYGMDYWGQGTTVTVSSGGGGSGGGGSGGGGSGDIVMTQSPDSLAVSLGERATINCRASKSVSTSGYSFMHWYQQKPGQPPKLLIYLASNLESGVPDRFSGSGSGTDFTLTISSLQAEDVAVYYCQHSREVPWTFGQGTKVEIKESKYGPPCPSCPFWVLVVVGGVLACYSLLVTVAFIIFWVRSKRSRLLHSDYMNMTPRRPGPTRKHYQPYAPPRDFAAYRSYFLGRLVPRGRGAAEAATRKQRITETESPYQELQGQRSDVYSDLNTQRPYYK

SEQ ID NO: 2778 - protein, 377 aa, Artificial Sequence
  CAT-CD70-308 (without signal peptide)
QVQLVQSGAEVKKPGASVKVSCKASGYTFTNYGMNWVRQAPGQGLKWMGWINTYTGEPTYADAFKGRVTMTRDTSISTAYMELSRLRSDDTAVYYCARDYGDYGMDYWGQGTTVTVSSGGGGSGGGGSGGGGSGDIVMTQSPDSLAVSLGERATINCRASKSVSTSGYSFMHWYQQKPGQPPKLLIYLASNLESGVPDRFSGSGSGTDFTLTISSLQAEDVAVYYCQHSREVPWTFGQGTKVEIKESKYGPPCPSCPFWVLVVVGGVLACYSLLVTVAFIIFWVRSKRSRLLHSDYMNMTPRRPGPTRKHYQPYAPPRDFAAYRSYFLGRLVPRGRGAAEAATRKQRITETESPYQELQGQRSDVYSDLNTQRPYYK

SEQ ID NO: 2779 - protein, 505 aa, Artificial Sequence
  CAT-CD70-309
MALPVTALLLPLALLLHAARPQVQLVQSGAEVKKPGASVKVSCKASGYTFTNYGMNWVRQAPGQGLKWMGWINTYTGEPTYADAFKGRVTMTRDTSISTAYMELSRLRSDDTAVYYCARDYGDYGMDYWGQGTTVTVSSGGGGSGGGGSGGGGSGDIVMTQSPDSLAVSLGERATINCRASKSVSTSGYSFMHWYQQKPGQPPKLLIYLASNLESGVPDRFSGSGSGTDFTLTISSLQAEDVAVYYCQHSREVPWTFGQGTKVEIKESKYGPPCPSCPGQPREPQVYTLPPSQEEMTKNQVSLTCLVKGFYPSDIAVEWESNGQPENNYKTTPPVLDSDGSFFLYSRLTVDKSRWQEGNVFSCSVMHEALHNHYTQKSLSLSLGKFWVLVVVGGVLACYSLLVTVAFIIFWVRSKRSRLLHSDYMNMTPRRPGPTRKHYQPYAPPRDFAAYRSYFLGRLVPRGRGAAEAATRKQRITETESPYQELQGQRSDVYSDLNTQRPYYK

SEQ ID NO: 2780 - protein, 484 aa, Artificial Sequence
  CAT-CD70-309 (without signal peptide)
QVQLVQSGAEVKKPGASVKVSCKASGYTFTNYGMNWVRQAPGQGLKWMGWINTYTGEPTYADAFKGRVTMTRDTSISTAYMELSRLRSDDTAVYYCARDYGDYGMDYWGQGTTVTVSSGGGGSGGGGSGGGGSGDIVMTQSPDSLAVSLGERATINCRASKSVSTSGYSFMHWYQQKPGQPPKLLIYLASNLESGVPDRFSGSGSGTDFTLTISSLQAEDVAVYYCQHSREVPWTFGQGTKVEIKESKYGPPCPSCPGQPREPQVYTLPPSQEEMTKNQVSLTCLVKGFYPSDIAVEWESNGQPENNYKTTPPVLDSDGSFFLYSRLTVDKSRWQEGNVFSCSVMHEALHNHYTQKSLSLSLGKFWVLVVVGGVLACYSLLVTVAFIIFWVRSKRSRLLHSDYMNMTPRRPGPTRKHYQPYAPPRDFAAYRSYFLGRLVPRGRGAAEAATRKQRITETESPYQELQGQRSDVYSDLNTQRPYYK

SEQ ID NO: 2781 - protein, 615 aa, Artificial Sequence
  CAT-CD70-310
MALPVTALLLPLALLLHAARPQVQLVQSGAEVKKPGASVKVSCKASGYTFTNYGMNWVRQAPGQGLKWMGWINTYTGEPTYADAFKGRVTMTRDTSISTAYMELSRLRSDDTAVYYCARDYGDYGMDYWGQGTTVTVSSGGGGSGGGGSGGGGSGDIVMTQSPDSLAVSLGERATINCRASKSVSTSGYSFMHWYQQKPGQPPKLLIYLASNLESGVPDRFSGSGSGTDFTLTISSLQAEDVAVYYCQHSREVPWTFGQGTKVEIKESKYGPPCPSCPAPEFLGGPSVFLFPPKPKDTLMISRTPEVTCVVVDVSQEDPEVQFNWYVDGVEVHNAKTKPREEQFNSTYRVVSVLTVLHQDWLNGKEYKCKVSNKGLPSSIEKTISKAKGQPREPQVYTLPPSQEEMTKNQVSLTCLVKGFYPSDIAVEWESNGQPENNYKTTPPVLDSDGSFFLYSRLTVDKSRWQEGNVFSCSVMHEALHNHYTQKSLSLSLGKFWVLVVVGGVLACYSLLVTVAFIIFWVRSKRSRLLHSDYMNMTPRRPGPTRKHYQPYAPPRDFAAYRSYFLGRLVPRGRGAAEAATRKQRITETESPYQELQGQRSDVYSDLNTQRPYYK

SEQ ID NO: 2782 - protein, 594 aa, Artificial Sequence
  CAT-CD70-310 (without signal peptide)
QVQLVQSGAEVKKPGASVKVSCKASGYTFTNYGMNWVRQAPGQGLKWMGWINTYTGEPTYADAFKGRVTMTRDTSISTAYMELSRLRSDDTAVYYCARDYGDYGMDYWGQGTTVTVSSGGGGSGGGGSGGGGSGDIVMTQSPDSLAVSLGERATINCRASKSVSTSGYSFMHWYQQKPGQPPKLLIYLASNLESGVPDRFSGSGSGTDFTLTISSLQAEDVAVYYCQHSREVPWTFGQGTKVEIKESKYGPPCPSCPAPEFLGGPSVFLFPPKPKDTLMISRTPEVTCVVVDVSQEDPEVQFNWYVDGVEVHNAKTKPREEQFNSTYRVVSVLTVLHQDWLNGKEYKCKVSNKGLPSSIEKTISKAKGQPREPQVYTLPPSQEEMTKNQVSLTCLVKGFYPSDIAVEWESNGQPENNYKTTPPVLDSDGSFFLYSRLTVDKSRWQEGNVFSCSVMHEALHNHYTQKSLSLSLGKFWVLVVVGGVLACYSLLVTVAFIIFWVRSKRSRLLHSDYMNMTPRRPGPTRKHYQPYAPPRDFAAYRSYFLGRLVPRGRGAAEAATRKQRITETESPYQELQGQRSDVYSDLNTQRPYYK

SEQ ID NO: 2783 - protein, 615 aa, Artificial Sequence
  CAT-CD70-311
MALPVTALLLPLALLLHAARPQVQLVQSGAEVKKPGASVKVSCKASGYTFTNYGMNWVRQAPGQGLKWMGWINTYTGEPTYADAFKGRVTMTRDTSISTAYMELSRLRSDDTAVYYCARDYGDYGMDYWGQGTTVTVSSGGGGSGGGGSGGGGSGDIVMTQSPDSLAVSLGERATINCRASKSVSTSGYSFMHWYQQKPGQPPKLLIYLASNLESGVPDRFSGSGSGTDFTLTISSLQAEDVAVYYCQHSREVPWTFGQGTKVEIKESKYGPPCPSCPAPEFEGGPSVFLFPPKPKDTLMISRTPEVTCVVVDVSQEDPEVQFNWYVDGVEVHNAKTKPREEQFQSTYRVVSVLTVLHQDWLNGKEYKCKVSNKGLPSSIEKTISKAKGQPREPQVYTLPPSQEEMTKNQVSLTCLVKGFYPSDIAVEWESNGQPENNYKTTPPVLDSDGSFFLYSRLTVDKSRWQEGNVFSCSVMHEALHNHYTQKSLSLSLGKFWVLVVVGGVLACYSLLVTVAFIIFWVRSKRSRLLHSDYMNMTPRRPGPTRKHYQPYAPPRDFAAYRSYFLGRLVPRGRGAAEAATRKQRITETESPYQELQGQRSDVYSDLNTQRPYYK

SEQ ID NO: 2784 - protein, 594 aa, Artificial Sequence
  CAT-CD70-311 (without signal peptide)
QVQLVQSGAEVKKPGASVKVSCKASGYTFTNYGMNWVRQAPGQGLKWMGWINTYTGEPTYADAFKGRVTMTRDTSISTAYMELSRLRSDDTAVYYCARDYGDYGMDYWGQGTTVTVSSGGGGSGGGGSGGGGSGDIVMTQSPDSLAVSLGERATINCRASKSVSTSGYSFMHWYQQKPGQPPKLLIYLASNLESGVPDRFSGSGSGTDFTLTISSLQAEDVAVYYCQHSREVPWTFGQGTKVEIKESKYGPPCPSCPAPEFEGGPSVFLFPPKPKDTLMISRTPEVTCVVVDVSQEDPEVQFNWYVDGVEVHNAKTKPREEQFQSTYRVVSVLTVLHQDWLNGKEYKCKVSNKGLPSSIEKTISKAKGQPREPQVYTLPPSQEEMTKNQVSLTCLVKGFYPSDIAVEWESNGQPENNYKTTPPVLDSDGSFFLYSRLTVDKSRWQEGNVFSCSVMHEALHNHYTQKSLSLSLGKFWVLVVVGGVLACYSLLVTVAFIIFWVRSKRSRLLHSDYMNMTPRRPGPTRKHYQPYAPPRDFAAYRSYFLGRLVPRGRGAAEAATRKQRITETESPYQELQGQRSDVYSDLNTQRPYYK

SEQ ID NO: 2785 - protein, 491 aa, Artificial Sequence
  CAT-CD70-312
MALPVTALLLPLALLLHAARPQVQLVQSGAEVKKPGASVKVSCKASGYTFTNYGMNWVRQAPGQGLKWMGWINTYTGEPTYADAFKGRVTMTRDTSISTAYMELSRLRSDDTAVYYCARDYGDYGMDYWGQGTTVTVSSGGGGSGGGGSGGGGSGDIVMTQSPDSLAVSLGERATINCRASKSVSTSGYSFMHWYQQKPGQPPKLLIYLASNLESGVPDRFSGSGSGTDFTLTISSLQAEDVAVYYCQHSREVPWTFGQGTKVEIKTTTPAPRPPTPAPTIASQPLSLRPEACRPAAGGAVHTRGLDFACDFWVLVVVGGVLACYSLLVTVAFIIFWVRSKRSRLLHSDYMNMTPRRPGPTRKHYQPYAPPRDFAAYRSRVKFSRSADAPAYQQGQNQLYNELNLGRREEYDVLDKRRGRDPEMGGKPRRKNPQEGLYNELQKDKMAEAYSEIGMKGERRRGKGHDGLYQGLSTATKDTYDALHMQALPPR

SEQ ID NO: 2786 - protein, 470 aa, Artificial Sequence
  CAT-CD70-312 (without signal peptide)
QVQLVQSGAEVKKPGASVKVSCKASGYTFTNYGMNWVRQAPGQGLKWMGWINTYTGEPTYADAFKGRVTMTRDTSISTAYMELSRLRSDDTAVYYCARDYGDYGMDYWGQGTTVTVSSGGGGSGGGGSGGGGSGDIVMTQSPDSLAVSLGERATINCRASKSVSTSGYSFMHWYQQKPGQPPKLLIYLASNLESGVPDRFSGSGSGTDFTLTISSLQAEDVAVYYCQHSREVPWTFGQGTKVEIKTTTPAPRPPTPAPTIASQPLSLRPEACRPAAGGAVHTRGLDFACDFWVLVVVGGVLACYSLLVTVAFIIFWVRSKRSRLLHSDYMNMTPRRPGPTRKHYQPYAPPRDFAAYRSRVKFSRSADAPAYQQGQNQLYNELNLGRREEYDVLDKRRGRDPEMGGKPRRKNPQEGLYNELQKDKMAEAYSEIGMKGERRRGKGHDGLYQGLSTATKDTYDALHMQALPPR

SEQ ID NO: 2787 - protein, 465 aa, Artificial Sequence
  CAT-CD70-360
MALPVTALLLPLALLLHAARPQVQLVQSGAEVKKPGASVKVSCKASGYTFTNYGMNWVRQAPGQGLKWMGWINTYTGEPTYADAFKGRVTMTRDTSISTAYMELSRLRSDDTAVYYCARDYGDYGMDYWGQGTTVTVSSGGGGSGGGGSGGGGSGDIVMTQSPDSLAVSLGERATINCRASKSVSTSGYSFMHWYQQKPGQPPKLLIYLASNLESGVPDRFSGSGSGTDFTLTISSLQAEDVAVYYCQHSREVPWTFGQGTKVEIKAEPKSPDKTHTCPPCPKDPFWVLVVVGGVLACYSLLVTVAFIIFWVRSKRSRLLHSDYMNMTPRRPGPTRKHYQPYAPPRDFAAYRSRVKFSRSADAPAYQQGQNQLYNELNLGRREEYDVLDKRRGRDPEMGGKPRRKNPQEGLYNELQKDKMAEAYSEIGMKGERRRGKGHDGLYQGLSTATKDTYDALHMQALPPR

SEQ ID NO: 2788 - protein, 444 aa, Artificial Sequence
  CAT-CD70-360 (without signal peptide)
QVQLVQSGAEVKKPGASVKVSCKASGYTFTNYGMNWVRQAPGQGLKWMGWINTYTGEPTYADAFKGRVTMTRDTSISTAYMELSRLRSDDTAVYYCARDYGDYGMDYWGQGTTVTVSSGGGGSGGGGSGGGGSGDIVMTQSPDSLAVSLGERATINCRASKSVSTSGYSFMHWYQQKPGQPPKLLIYLASNLESGVPDRFSGSGSGTDFTLTISSLQAEDVAVYYCQHSREVPWTFGQGTKVEIKAEPKSPDKTHTCPPCPKDPFWVLVVVGGVLACYSLLVTVAFIIFWVRSKRSRLLHSDYMNMTPRRPGPTRKHYQPYAPPRDFAAYRSRVKFSRSADAPAYQQGQNQLYNELNLGRREEYDVLDKRRGRDPEMGGKPRRKNPQEGLYNELQKDKMAEAYSEIGMKGERRRGKGHDGLYQGLSTATKDTYDALHMQALPPR

SEQ ID NO: 2789 - protein, 458 aa, Artificial Sequence
  CAT-CD70-313
MALPVTALLLPLALLLHAARPQVQLVQSGAEVKKPGASVKVSCKASGYTFTNYGMNWVRQAPGQGLKWMGWINTYTGEPTYADAFKGRVTMTRDTSISTAYMELSRLRSDDTAVYYCARDYGDYGMDYWGQGTTVTVSSGGGGSGGGGSGGGGSGDIVMTQSPDSLAVSLGERATINCRASKSVSTSGYSFMHWYQQKPGQPPKLLIYLASNLESGVPDRFSGSGSGTDFTLTISSLQAEDVAVYYCQHSREVPWTFGQGTKVEIKESKYGPPCPSCPFWVLVVVGGVLACYSLLVTVAFIIFWVRSKRSRLLHSDYMNMTPRRPGPTRKHYQPYAPPRDFAAYRSRVKFSRSADAPAYQQGQNQLYNELNLGRREEYDVLDKRRGRDPEMGGKPRRKNPQEGLYNELQKDKMAEAYSEIGMKGERRRGKGHDGLYQGLSTATKDTYDALHMQALPPR

SEQ ID NO: 2790 - protein, 437 aa, Artificial Sequence
  CAT-CD70-313 (without signal peptide)
QVQLVQSGAEVKKPGASVKVSCKASGYTFTNYGMNWVRQAPGQGLKWMGWINTYTGEPTYADAFKGRVTMTRDTSISTAYMELSRLRSDDTAVYYCARDYGDYGMDYWGQGTTVTVSSGGGGSGGGGSGGGGSGDIVMTQSPDSLAVSLGERATINCRASKSVSTSGYSFMHWYQQKPGQPPKLLIYLASNLESGVPDRFSGSGSGTDFTLTISSLQAEDVAVYYCQHSREVPWTFGQGTKVEIKESKYGPPCPSCPFWVLVVVGGVLACYSLLVTVAFIIFWVRSKRSRLLHSDYMNMTPRRPGPTRKHYQPYAPPRDFAAYRSRVKFSRSADAPAYQQGQNQLYNELNLGRREEYDVLDKRRGRDPEMGGKPRRKNPQEGLYNELQKDKMAEAYSEIGMKGERRRGKGHDGLYQGLSTATKDTYDALHMQALPPR

SEQ ID NO: 2791 - protein, 565 aa, Artificial Sequence
  CAT-CD70-314
MALPVTALLLPLALLLHAARPQVQLVQSGAEVKKPGASVKVSCKASGYTFTNYGMNWVRQAPGQGLKWMGWINTYTGEPTYADAFKGRVTMTRDTSISTAYMELSRLRSDDTAVYYCARDYGDYGMDYWGQGTTVTVSSGGGGSGGGGSGGGGSGDIVMTQSPDSLAVSLGERATINCRASKSVSTSGYSFMHWYQQKPGQPPKLLIYLASNLESGVPDRFSGSGSGTDFTLTISSLQAEDVAVYYCQHSREVPWTFGQGTKVEIKESKYGPPCPSCPGQPREPQVYTLPPSQEEMTKNQVSLTCLVKGFYPSDIAVEWESNGQPENNYKTTPPVLDSDGSFFLYSRLTVDKSRWQEGNVFSCSVMHEALHNHYTQKSLSLSLGKFWVLVVVGGVLACYSLLVTVAFIIFWVRSKRSRLLHSDYMNMTPRRPGPTRKHYQPYAPPRDFAAYRSRVKFSRSADAPAYQQGQNQLYNELNLGRREEYDVLDKRRGRDPEMGGKPRRKNPQEGLYNELQKDKMAEAYSEIGMKGERRRGKGHDGLYQGLSTATKDTYDALHMQALPPR

SEQ ID NO: 2792 - protein, 544 aa, Artificial Sequence
  CAT-CD70-314 (without signal peptide)
QVQLVQSGAEVKKPGASVKVSCKASGYTFTNYGMNWVRQAPGQGLKWMGWINTYTGEPTYADAFKGRVTMTRDTSISTAYMELSRLRSDDTAVYYCARDYGDYGMDYWGQGTTVTVSSGGGGSGGGGSGGGGSGDIVMTQSPDSLAVSLGERATINCRASKSVSTSGYSFMHWYQQKPGQPPKLLIYLASNLESGVPDRFSGSGSGTDFTLTISSLQAEDVAVYYCQHSREVPWTFGQGTKVEIKESKYGPPCPSCPGQPREPQVYTLPPSQEEMTKNQVSLTCLVKGFYPSDIAVEWESNGQPENNYKTTPPVLDSDGSFFLYSRLTVDKSRWQEGNVFSCSVMHEALHNHYTQKSLSLSLGKFWVLVVVGGVLACYSLLVTVAFIIFWVRSKRSRLLHSDYMNMTPRRPGPTRKHYQPYAPPRDFAAYRSRVKFSRSADAPAYQQGQNQLYNELNLGRREEYDVLDKRRGRDPEMGGKPRRKNPQEGLYNELQKDKMAEAYSEIGMKGERRRGKGHDGLYQGLSTATKDTYDALHMQALPPR

SEQ ID NO: 2793 - protein, 675 aa, Artificial Sequence
  CAT-CD70-315
MALPVTALLLPLALLLHAARPQVQLVQSGAEVKKPGASVKVSCKASGYTFTNYGMNWVRQAPGQGLKWMGWINTYTGEPTYADAFKGRVTMTRDTSISTAYMELSRLRSDDTAVYYCARDYGDYGMDYWGQGTTVTVSSGGGGSGGGGSGGGGSGDIVMTQSPDSLAVSLGERATINCRASKSVSTSGYSFMHWYQQKPGQPPKLLIYLASNLESGVPDRFSGSGSGTDFTLTISSLQAEDVAVYYCQHSREVPWTFGQGTKVEIKESKYGPPCPSCPAPEFLGGPSVFLFPPKPKDTLMISRTPEVTCVVVDVSQEDPEVQFNWYVDGVEVHNAKTKPREEQFNSTYRVVSVLTVLHQDWLNGKEYKCKVSNKGLPSSIEKTISKAKGQPREPQVYTLPPSQEEMTKNQVSLTCLVKGFYPSDIAVEWESNGQPENNYKTTPPVLDSDGSFFLYSRLTVDKSRWQEGNVFSCSVMHEALHNHYTQKSLSLSLGKFWVLVVVGGVLACYSLLVTVAFIIFWVRSKRSRLLHSDYMNMTPRRPGPTRKHYQPYAPPRDFAAYRSRVKFSRSADAPAYQQGQNQLYNELNLGRREEYDVLDKRRGRDPEMGGKPRRKNPQEGLYNELQKDKMAEAYSEIGMKGERRRGKGHDGLYQGLSTATKDTYDALHMQALPPR

SEQ ID NO: 2794 - protein, 654 aa, Artificial Sequence
  CAT-CD70-315 (without signal peptide)
QVQLVQSGAEVKKPGASVKVSCKASGYTFTNYGMNWVRQAPGQGLKWMGWINTYTGEPTYADAFKGRVTMTRDTSISTAYMELSRLRSDDTAVYYCARDYGDYGMDYWGQGTTVTVSSGGGGSGGGGSGGGGSGDIVMTQSPDSLAVSLGERATINCRASKSVSTSGYSFMHWYQQKPGQPPKLLIYLASNLESGVPDRFSGSGSGTDFTLTISSLQAEDVAVYYCQHSREVPWTFGQGTKVEIKESKYGPPCPSCPAPEFLGGPSVFLFPPKPKDTLMISRTPEVTCVVVDVSQEDPEVQFNWYVDGVEVHNAKTKPREEQFNSTYRVVSVLTVLHQDWLNGKEYKCKVSNKGLPSSIEKTISKAKGQPREPQVYTLPPSQEEMTKNQVSLTCLVKGFYPSDIAVEWESNGQPENNYKTTPPVLDSDGSFFLYSRLTVDKSRWQEGNVFSCSVMHEALHNHYTQKSLSLSLGKFWVLVVVGGVLACYSLLVTVAFIIFWVRSKRSRLLHSDYMNMTPRRPGPTRKHYQPYAPPRDFAAYRSRVKFSRSADAPAYQQGQNQLYNELNLGRREEYDVLDKRRGRDPEMGGKPRRKNPQEGLYNELQKDKMAEAYSEIGMKGERRRGKGHDGLYQGLSTATKDTYDALHMQALPPR

SEQ ID NO: 2795 - protein, 675 aa, Artificial Sequence
  CAT-CD70-316
MALPVTALLLPLALLLHAARPQVQLVQSGAEVKKPGASVKVSCKASGYTFTNYGMNWVRQAPGQGLKWMGWINTYTGEPTYADAFKGRVTMTRDTSISTAYMELSRLRSDDTAVYYCARDYGDYGMDYWGQGTTVTVSSGGGGSGGGGSGGGGSGDIVMTQSPDSLAVSLGERATINCRASKSVSTSGYSFMHWYQQKPGQPPKLLIYLASNLESGVPDRFSGSGSGTDFTLTISSLQAEDVAVYYCQHSREVPWTFGQGTKVEIKESKYGPPCPSCPAPEFEGGPSVFLFPPKPKDTLMISRTPEVTCVVVDVSQEDPEVQFNWYVDGVEVHNAKTKPREEQFQSTYRVVSVLTVLHQDWLNGKEYKCKVSNKGLPSSIEKTISKAKGQPREPQVYTLPPSQEEMTKNQVSLTCLVKGFYPSDIAVEWESNGQPENNYKTTPPVLDSDGSFFLYSRLTVDKSRWQEGNVFSCSVMHEALHNHYTQKSLSLSLGKFWVLVVVGGVLACYSLLVTVAFIIFWVRSKRSRLLHSDYMNMTPRRPGPTRKHYQPYAPPRDFAAYRSRVKFSRSADAPAYQQGQNQLYNELNLGRREEYDVLDKRRGRDPEMGGKPRRKNPQEGLYNELQKDKMAEAYSEIGMKGERRRGKGHDGLYQGLSTATKDTYDALHMQALPPR

SEQ ID NO: 2796 - protein, 654 aa, Artificial Sequence
  CAT-CD70-316 (without signal peptide)
QVQLVQSGAEVKKPGASVKVSCKASGYTFTNYGMNWVRQAPGQGLKWMGWINTYTGEPTYADAFKGRVTMTRDTSISTAYMELSRLRSDDTAVYYCARDYGDYGMDYWGQGTTVTVSSGGGGSGGGGSGGGGSGDIVMTQSPDSLAVSLGERATINCRASKSVSTSGYSFMHWYQQKPGQPPKLLIYLASNLESGVPDRFSGSGSGTDFTLTISSLQAEDVAVYYCQHSREVPWTFGQGTKVEIKESKYGPPCPSCPAPEFEGGPSVFLFPPKPKDTLMISRTPEVTCVVVDVSQEDPEVQFNWYVDGVEVHNAKTKPREEQFQSTYRVVSVLTVLHQDWLNGKEYKCKVSNKGLPSSIEKTISKAKGQPREPQVYTLPPSQEEMTKNQVSLTCLVKGFYPSDIAVEWESNGQPENNYKTTPPVLDSDGSFFLYSRLTVDKSRWQEGNVFSCSVMHEALHNHYTQKSLSLSLGKFWVLVVVGGVLACYSLLVTVAFIIFWVRSKRSRLLHSDYMNMTPRRPGPTRKHYQPYAPPRDFAAYRSRVKFSRSADAPAYQQGQNQLYNELNLGRREEYDVLDKRRGRDPEMGGKPRRKNPQEGLYNELQKDKMAEAYSEIGMKGERRRGKGHDGLYQGLSTATKDTYDALHMQALPPR

SEQ ID NO: 2797 - protein, 513 aa, Artificial Sequence
  CAT-CD70-317
MALPVTALLLPLALLLHAARPQVQLVQSGAEVKKPGASVKVSCKASGYTFTNYGMNWVRQAPGQGLKWMGWINTYTGEPTYADAFKGRVTMTRDTSISTAYMELSRLRSDDTAVYYCARDYGDYGMDYWGQGTTVTVSSGGGGSGGGGSGGGGSGDIVMTQSPDSLAVSLGERATINCRASKSVSTSGYSFMHWYQQKPGQPPKLLIYLASNLESGVPDRFSGSGSGTDFTLTISSLQAEDVAVYYCQHSREVPWTFGQGTKVEIKTTTPAPRPPTPAPTIASQPLSLRPEACRPAAGGAVHTRGLDFACDFWVLVVVGGVLACYSLLVTVAFIIFWVRSKRSRLLHSDYMNMTPRRPGPTRKHYQPYAPPRDFAAYRSERVQPLEENVGNAARPRFERNKRVKFSRSADAPAYQQGQNQLYNELNLGRREEYDVLDKRRGRDPEMGGKPRRKNPQEGLYNELQKDKMAEAYSEIGMKGERRRGKGHDGLYQGLSTATKDTYDALHMQALPPR

SEQ ID NO: 2798 - protein, 492 aa, Artificial Sequence
  CAT-CD70-317 (without signal peptide)
QVQLVQSGAEVKKPGASVKVSCKASGYTFTNYGMNWVRQAPGQGLKWMGWINTYTGEPTYADAFKGRVTMTRDTSISTAYMELSRLRSDDTAVYYCARDYGDYGMDYWGQGTTVTVSSGGGGSGGGGSGGGGSGDIVMTQSPDSLAVSLGERATINCRASKSVSTSGYSFMHWYQQKPGQPPKLLIYLASNLESGVPDRFSGSGSGTDFTLTISSLQAEDVAVYYCQHSREVPWTFGQGTKVEIKTTTPAPRPPTPAPTIASQPLSLRPEACRPAAGGAVHTRGLDFACDFWVLVVVGGVLACYSLLVTVAFIIFWVRSKRSRLLHSDYMNMTPRRPGPTRKHYQPYAPPRDFAAYRSERVQPLEENVGNAARPRFERNKRVKFSRSADAPAYQQGQNQLYNELNLGRREEYDVLDKRRGRDPEMGGKPRRKNPQEGLYNELQKDKMAEAYSEIGMKGERRRGKGHDGLYQGLSTATKDTYDALHMQALPPR

SEQ ID NO: 2799 - protein, 523 aa, Artificial Sequence
  CAT-CD70-318
MALPVTALLLPLALLLHAARPQVQLVQSGAEVKKPGASVKVSCKASGYTFTNYGMNWVRQAPGQGLKWMGWINTYTGEPTYADAFKGRVTMTRDTSISTAYMELSRLRSDDTAVYYCARDYGDYGMDYWGQGTTVTVSSGGGGSGGGGSGGGGSGDIVMTQSPDSLAVSLGERATINCRASKSVSTSGYSFMHWYQQKPGQPPKLLIYLASNLESGVPDRFSGSGSGTDFTLTISSLQAEDVAVYYCQHSREVPWTFGQGTKVEIKFVPVFLPAKPTTTPAPRPPTPAPTIASQPLSLRPEACRPAAGGAVHTRGLDFACDFWVLVVVGGVLACYSLLVTVAFIIFWVRSKRSRLLHSDYMNMTPRRPGPTRKHYQPYAPPRDFAAYRSERVQPLEENVGNAARPRFERNKRVKFSRSADAPAYQQGQNQLYNELNLGRREEYDVLDKRRGRDPEMGGKPRRKNPQEGLYNELQKDKMAEAYSEIGMKGERRRGKGHDGLYQGLSTATKDTYDALHMQALPPR

SEQ ID NO: 2800 - protein, 502 aa, Artificial Sequence
  CAT-CD70-318 (without signal peptide)
QVQLVQSGAEVKKPGASVKVSCKASGYTFTNYGMNWVRQAPGQGLKWMGWINTYTGEPTYADAFKGRVTMTRDTSISTAYMELSRLRSDDTAVYYCARDYGDYGMDYWGQGTTVTVSSGGGGSGGGGSGGGGSGDIVMTQSPDSLAVSLGERATINCRASKSVSTSGYSFMHWYQQKPGQPPKLLIYLASNLESGVPDRFSGSGSGTDFTLTISSLQAEDVAVYYCQHSREVPWTFGQGTKVEIKFVPVFLPAKPTTTPAPRPPTPAPTIASQPLSLRPEACRPAAGGAVHTRGLDFACDFWVLVVVGGVLACYSLLVTVAFIIFWVRSKRSRLLHSDYMNMTPRRPGPTRKHYQPYAPPRDFAAYRSERVQPLEENVGNAARPRFERNKRVKFSRSADAPAYQQGQNQLYNELNLGRREEYDVLDKRRGRDPEMGGKPRRKNPQEGLYNELQKDKMAEAYSEIGMKGERRRGKGHDGLYQGLSTATKDTYDALHMQALPPR

SEQ ID NO: 2801 - protein, 487 aa, Artificial Sequence
  CAT-CD70-319
MALPVTALLLPLALLLHAARPQVQLVQSGAEVKKPGASVKVSCKASGYTFTNYGMNWVRQAPGQGLKWMGWINTYTGEPTYADAFKGRVTMTRDTSISTAYMELSRLRSDDTAVYYCARDYGDYGMDYWGQGTTVTVSSGGGGSGGGGSGGGGSGDIVMTQSPDSLAVSLGERATINCRASKSVSTSGYSFMHWYQQKPGQPPKLLIYLASNLESGVPDRFSGSGSGTDFTLTISSLQAEDVAVYYCQHSREVPWTFGQGTKVEIKAEPKSPDKTHTCPPCPKDPFWVLVVVGGVLACYSLLVTVAFIIFWVRSKRSRLLHSDYMNMTPRRPGPTRKHYQPYAPPRDFAAYRSERVQPLEENVGNAARPRFERNKRVKFSRSADAPAYQQGQNQLYNELNLGRREEYDVLDKRRGRDPEMGGKPRRKNPQEGLYNELQKDKMAEAYSEIGMKGERRRGKGHDGLYQGLSTATKDTYDALHMQALPPR

SEQ ID NO: 2802 - protein, 466 aa, Artificial Sequence
  CAT-CD70-319 (without signal peptide)
QVQLVQSGAEVKKPGASVKVSCKASGYTFTNYGMNWVRQAPGQGLKWMGWINTYTGEPTYADAFKGRVTMTRDTSISTAYMELSRLRSDDTAVYYCARDYGDYGMDYWGQGTTVTVSSGGGGSGGGGSGGGGSGDIVMTQSPDSLAVSLGERATINCRASKSVSTSGYSFMHWYQQKPGQPPKLLIYLASNLESGVPDRFSGSGSGTDFTLTISSLQAEDVAVYYCQHSREVPWTFGQGTKVEIKAEPKSPDKTHTCPPCPKDPFWVLVVVGGVLACYSLLVTVAFIIFWVRSKRSRLLHSDYMNMTPRRPGPTRKHYQPYAPPRDFAAYRSERVQPLEENVGNAARPRFERNKRVKFSRSADAPAYQQGQNQLYNELNLGRREEYDVLDKRRGRDPEMGGKPRRKNPQEGLYNELQKDKMAEAYSEIGMKGERRRGKGHDGLYQGLSTATKDTYDALHMQALPPR

SEQ ID NO: 2803 - protein, 480 aa, Artificial Sequence
  CAT-CD70-320
MALPVTALLLPLALLLHAARPQVQLVQSGAEVKKPGASVKVSCKASGYTFTNYGMNWVRQAPGQGLKWMGWINTYTGEPTYADAFKGRVTMTRDTSISTAYMELSRLRSDDTAVYYCARDYGDYGMDYWGQGTTVTVSSGGGGSGGGGSGGGGSGDIVMTQSPDSLAVSLGERATINCRASKSVSTSGYSFMHWYQQKPGQPPKLLIYLASNLESGVPDRFSGSGSGTDFTLTISSLQAEDVAVYYCQHSREVPWTFGQGTKVEIKESKYGPPCPSCPFWVLVVVGGVLACYSLLVTVAFIIFWVRSKRSRLLHSDYMNMTPRRPGPTRKHYQPYAPPRDFAAYRSERVQPLEENVGNAARPRFERNKRVKFSRSADAPAYQQGQNQLYNELNLGRREEYDVLDKRRGRDPEMGGKPRRKNPQEGLYNELQKDKMAEAYSEIGMKGERRRGKGHDGLYQGLSTATKDTYDALHMQALPPR

SEQ ID NO: 2804 - protein, 459 aa, Artificial Sequence
  CAT-CD70-320 (without signal peptide)
QVQLVQSGAEVKKPGASVKVSCKASGYTFTNYGMNWVRQAPGQGLKWMGWINTYTGEPTYADAFKGRVTMTRDTSISTAYMELSRLRSDDTAVYYCARDYGDYGMDYWGQGTTVTVSSGGGGSGGGGSGGGGSGDIVMTQSPDSLAVSLGERATINCRASKSVSTSGYSFMHWYQQKPGQPPKLLIYLASNLESGVPDRFSGSGSGTDFTLTISSLQAEDVAVYYCQHSREVPWTFGQGTKVEIKESKYGPPCPSCPFWVLVVVGGVLACYSLLVTVAFIIFWVRSKRSRLLHSDYMNMTPRRPGPTRKHYQPYAPPRDFAAYRSERVQPLEENVGNAARPRFERNKRVKFSRSADAPAYQQGQNQLYNELNLGRREEYDVLDKRRGRDPEMGGKPRRKNPQEGLYNELQKDKMAEAYSEIGMKGERRRGKGHDGLYQGLSTATKDTYDALHMQALPPR

SEQ ID NO: 2805 - protein, 587 aa, Artificial Sequence
  CAT-CD70-321
MALPVTALLLPLALLLHAARPQVQLVQSGAEVKKPGASVKVSCKASGYTFTNYGMNWVRQAPGQGLKWMGWINTYTGEPTYADAFKGRVTMTRDTSISTAYMELSRLRSDDTAVYYCARDYGDYGMDYWGQGTTVTVSSGGGGSGGGGSGGGGSGDIVMTQSPDSLAVSLGERATINCRASKSVSTSGYSFMHWYQQKPGQPPKLLIYLASNLESGVPDRFSGSGSGTDFTLTISSLQAEDVAVYYCQHSREVPWTFGQGTKVEIKESKYGPPCPSCPGQPREPQVYTLPPSQEEMTKNQVSLTCLVKGFYPSDIAVEWESNGQPENNYKTTPPVLDSDGSFFLYSRLTVDKSRWQEGNVFSCSVMHEALHNHYTQKSLSLSLGKFWVLVVVGGVLACYSLLVTVAFIIFWVRSKRSRLLHSDYMNMTPRRPGPTRKHYQPYAPPRDFAAYRSERVQPLEENVGNAARPRFERNKRVKFSRSADAPAYQQGQNQLYNELNLGRREEYDVLDKRRGRDPEMGGKPRRKNPQEGLYNELQKDKMAEAYSEIGMKGERRRGKGHDGLYQGLSTATKDTYDALHMQALPPR

SEQ ID NO: 2806 - protein, 566 aa, Artificial Sequence
  CAT-CD70-321 (without signal peptide)
QVQLVQSGAEVKKPGASVKVSCKASGYTFTNYGMNWVRQAPGQGLKWMGWINTYTGEPTYADAFKGRVTMTRDTSISTAYMELSRLRSDDTAVYYCARDYGDYGMDYWGQGTTVTVSSGGGGSGGGGSGGGGSGDIVMTQSPDSLAVSLGERATINCRASKSVSTSGYSFMHWYQQKPGQPPKLLIYLASNLESGVPDRFSGSGSGTDFTLTISSLQAEDVAVYYCQHSREVPWTFGQGTKVEIKESKYGPPCPSCPGQPREPQVYTLPPSQEEMTKNQVSLTCLVKGFYPSDIAVEWESNGQPENNYKTTPPVLDSDGSFFLYSRLTVDKSRWQEGNVFSCSVMHEALHNHYTQKSLSLSLGKFWVLVVVGGVLACYSLLVTVAFIIFWVRSKRSRLLHSDYMNMTPRRPGPTRKHYQPYAPPRDFAAYRSERVQPLEENVGNAARPRFERNKRVKFSRSADAPAYQQGQNQLYNELNLGRREEYDVLDKRRGRDPEMGGKPRRKNPQEGLYNELQKDKMAEAYSEIGMKGERRRGKGHDGLYQGLSTATKDTYDALHMQALPPR

SEQ ID NO: 2807 - protein, 697 aa, Artificial Sequence
  CAT-CD70-322
MALPVTALLLPLALLLHAARPQVQLVQSGAEVKKPGASVKVSCKASGYTFTNYGMNWVRQAPGQGLKWMGWINTYTGEPTYADAFKGRVTMTRDTSISTAYMELSRLRSDDTAVYYCARDYGDYGMDYWGQGTTVTVSSGGGGSGGGGSGGGGSGDIVMTQSPDSLAVSLGERATINCRASKSVSTSGYSFMHWYQQKPGQPPKLLIYLASNLESGVPDRFSGSGSGTDFTLTISSLQAEDVAVYYCQHSREVPWTFGQGTKVEIKESKYGPPCPSCPAPEFLGGPSVFLFPPKPKDTLMISRTPEVTCVVVDVSQEDPEVQFNWYVDGVEVHNAKTKPREEQFNSTYRVVSVLTVLHQDWLNGKEYKCKVSNKGLPSSIEKTISKAKGQPREPQVYTLPPSQEEMTKNQVSLTCLVKGFYPSDIAVEWESNGQPENNYKTTPPVLDSDGSFFLYSRLTVDKSRWQEGNVFSCSVMHEALHNHYTQKSLSLSLGKFWVLVVVGGVLACYSLLVTVAFIIFWVRSKRSRLLHSDYMNMTPRRPGPTRKHYQPYAPPRDFAAYRSERVQPLEENVGNAARPRFERNKRVKFSRSADAPAYQQGQNQLYNELNLGRREEYDVLDKRRGRDPEMGGKPRRKNPQEGLYNELQKDKMAEAYSEIGMKGERRRGKGHDGLYQGLSTATKDTYDALHMQALPPR

SEQ ID NO: 2808 - protein, 676 aa, Artificial Sequence
  CAT-CD70-322 (without signal peptide)
QVQLVQSGAEVKKPGASVKVSCKASGYTFTNYGMNWVRQAPGQGLKWMGWINTYTGEPTYADAFKGRVTMTRDTSISTAYMELSRLRSDDTAVYYCARDYGDYGMDYWGQGTTVTVSSGGGGSGGGGSGGGGSGDIVMTQSPDSLAVSLGERATINCRASKSVSTSGYSFMHWYQQKPGQPPKLLIYLASNLESGVPDRFSGSGSGTDFTLTISSLQAEDVAVYYCQHSREVPWTFGQGTKVEIKESKYGPPCPSCPAPEFLGGPSVFLFPPKPKDTLMISRTPEVTCVVVDVSQEDPEVQFNWYVDGVEVHNAKTKPREEQFNSTYRVVSVLTVLHQDWLNGKEYKCKVSNKGLPSSIEKTISKAKGQPREPQVYTLPPSQEEMTKNQVSLTCLVKGFYPSDIAVEWESNGQPENNYKTTPPVLDSDGSFFLYSRLTVDKSRWQEGNVFSCSVMHEALHNHYTQKSLSLSLGKFWVLVVVGGVLACYSLLVTVAFIIFWVRSKRSRLLHSDYMNMTPRRPGPTRKHYQPYAPPRDFAAYRSERVQPLEENVGNAARPRFERNKRVKFSRSADAPAYQQGQNQLYNELNLGRREEYDVLDKRRGRDPEMGGKPRRKNPQEGLYNELQKDKMAEAYSEIGMKGERRRGKGHDGLYQGLSTATKDTYDALHMQALPPR

SEQ ID NO: 2809 - protein, 697 aa, Artificial Sequence
  CAT-CD70-323
MALPVTALLLPLALLLHAARPQVQLVQSGAEVKKPGASVKVSCKASGYTFTNYGMNWVRQAPGQGLKWMGWINTYTGEPTYADAFKGRVTMTRDTSISTAYMELSRLRSDDTAVYYCARDYGDYGMDYWGQGTTVTVSSGGGGSGGGGSGGGGSGDIVMTQSPDSLAVSLGERATINCRASKSVSTSGYSFMHWYQQKPGQPPKLLIYLASNLESGVPDRFSGSGSGTDFTLTISSLQAEDVAVYYCQHSREVPWTFGQGTKVEIKESKYGPPCPSCPAPEFEGGPSVFLFPPKPKDTLMISRTPEVTCVVVDVSQEDPEVQFNWYVDGVEVHNAKTKPREEQFQSTYRVVSVLTVLHQDWLNGKEYKCKVSNKGLPSSIEKTISKAKGQPREPQVYTLPPSQEEMTKNQVSLTCLVKGFYPSDIAVEWESNGQPENNYKTTPPVLDSDGSFFLYSRLTVDKSRWQEGNVFSCSVMHEALHNHYTQKSLSLSLGKFWVLVVVGGVLACYSLLVTVAFIIFWVRSKRSRLLHSDYMNMTPRRPGPTRKHYQPYAPPRDFAAYRSERVQPLEENVGNAARPRFERNKRVKFSRSADAPAYQQGQNQLYNELNLGRREEYDVLDKRRGRDPEMGGKPRRKNPQEGLYNELQKDKMAEAYSEIGMKGERRRGKGHDGLYQGLSTATKDTYDALHMQALPPR

SEQ ID NO: 2810 - protein, 676 aa, Artificial Sequence
  CAT-CD70-323 (without signal peptide)
QVQLVQSGAEVKKPGASVKVSCKASGYTFTNYGMNWVRQAPGQGLKWMGWINTYTGEPTYADAFKGRVTMTRDTSISTAYMELSRLRSDDTAVYYCARDYGDYGMDYWGQGTTVTVSSGGGGSGGGGSGGGGSGDIVMTQSPDSLAVSLGERATINCRASKSVSTSGYSFMHWYQQKPGQPPKLLIYLASNLESGVPDRFSGSGSGTDFTLTISSLQAEDVAVYYCQHSREVPWTFGQGTKVEIKESKYGPPCPSCPAPEFEGGPSVFLFPPKPKDTLMISRTPEVTCVVVDVSQEDPEVQFNWYVDGVEVHNAKTKPREEQFQSTYRVVSVLTVLHQDWLNGKEYKCKVSNKGLPSSIEKTISKAKGQPREPQVYTLPPSQEEMTKNQVSLTCLVKGFYPSDIAVEWESNGQPENNYKTTPPVLDSDGSFFLYSRLTVDKSRWQEGNVFSCSVMHEALHNHYTQKSLSLSLGKFWVLVVVGGVLACYSLLVTVAFIIFWVRSKRSRLLHSDYMNMTPRRPGPTRKHYQPYAPPRDFAAYRSERVQPLEENVGNAARPRFERNKRVKFSRSADAPAYQQGQNQLYNELNLGRREEYDVLDKRRGRDPEMGGKPRRKNPQEGLYNELQKDKMAEAYSEIGMKGERRRGKGHDGLYQGLSTATKDTYDALHMQALPPR

SEQ ID NO: 2811 - protein, 571 aa, Artificial Sequence
  CAT-CD70-324
MALPVTALLLPLALLLHAARPQVQLVQSGAEVKKPGASVKVSCKASGYTFTNYGMNWVRQAPGQGLKWMGWINTYTGEPTYADAFKGRVTMTRDTSISTAYMELSRLRSDDTAVYYCARDYGDYGMDYWGQGTTVTVSSGGGGSGGGGSGGGGSGDIVMTQSPDSLAVSLGERATINCRASKSVSTSGYSFMHWYQQKPGQPPKLLIYLASNLESGVPDRFSGSGSGTDFTLTISSLQAEDVAVYYCQHSREVPWTFGQGTKVEIKTTTPAPRPPTPAPTIASQPLSLRPEACRPAAGGAVHTRGLDFACDIYIWAPLAGTCGVLLLSLVITLYCNHRNWRRKRKEKQSETSPKEFLTIYEDVKDLKTRRNHEQEQTFPGGGSTIYSMIQSQSSAPTSQEPAYTLYSLIQPSRKSGSRKRNHSPSFNSTIYEVIGKSQPKAQNPARLSRKELENFDVYSRVKFSRSADAPAYQQGQNQLYNELNLGRREEYDVLDKRRGRDPEMGGKPRRKNPQEGLYNELQKDKMAEAYSEIGMKGERRRGKGHDGLYQGLSTATKDTYDALHMQALPPR

SEQ ID NO: 2812 - protein, 550 aa, Artificial Sequence
  CAT-CD70-324 (without signal peptide)
QVQLVQSGAEVKKPGASVKVSCKASGYTFTNYGMNWVRQAPGQGLKWMGWINTYTGEPTYADAFKGRVTMTRDTSISTAYMELSRLRSDDTAVYYCARDYGDYGMDYWGQGTTVTVSSGGGGSGGGGSGGGGSGDIVMTQSPDSLAVSLGERATINCRASKSVSTSGYSFMHWYQQKPGQPPKLLIYLASNLESGVPDRFSGSGSGTDFTLTISSLQAEDVAVYYCQHSREVPWTFGQGTKVEIKTTTPAPRPPTPAPTIASQPLSLRPEACRPAAGGAVHTRGLDFACDIYIWAPLAGTCGVLLLSLVITLYCNHRNWRRKRKEKQSETSPKEFLTIYEDVKDLKTRRNHEQEQTFPGGGSTIYSMIQSQSSAPTSQEPAYTLYSLIQPSRKSGSRKRNHSPSFNSTIYEVIGKSQPKAQNPARLSRKELENFDVYSRVKFSRSADAPAYQQGQNQLYNELNLGRREEYDVLDKRRGRDPEMGGKPRRKNPQEGLYNELQKDKMAEAYSEIGMKGERRRGKGHDGLYQGLSTATKDTYDALHMQALPPR

SEQ ID NO: 2813 - protein, 545 aa, Artificial Sequence
  CAT-CD70-325
MALPVTALLLPLALLLHAARPQVQLVQSGAEVKKPGASVKVSCKASGYTFTNYGMNWVRQAPGQGLKWMGWINTYTGEPTYADAFKGRVTMTRDTSISTAYMELSRLRSDDTAVYYCARDYGDYGMDYWGQGTTVTVSSGGGGSGGGGSGGGGSGDIVMTQSPDSLAVSLGERATINCRASKSVSTSGYSFMHWYQQKPGQPPKLLIYLASNLESGVPDRFSGSGSGTDFTLTISSLQAEDVAVYYCQHSREVPWTFGQGTKVEIKAEPKSPDKTHTCPPCPKDPIYIWAPLAGTCGVLLLSLVITLYCNHRNWRRKRKEKQSETSPKEFLTIYEDVKDLKTRRNHEQEQTFPGGGSTIYSMIQSQSSAPTSQEPAYTLYSLIQPSRKSGSRKRNHSPSFNSTIYEVIGKSQPKAQNPARLSRKELENFDVYSRVKFSRSADAPAYQQGQNQLYNELNLGRREEYDVLDKRRGRDPEMGGKPRRKNPQEGLYNELQKDKMAEAYSEIGMKGERRRGKGHDGLYQGLSTATKDTYDALHMQALPPR

SEQ ID NO: 2814 - protein, 524 aa, Artificial Sequence
  CAT-CD70-325 (without signal peptide)
QVQLVQSGAEVKKPGASVKVSCKASGYTFTNYGMNWVRQAPGQGLKWMGWINTYTGEPTYADAFKGRVTMTRDTSISTAYMELSRLRSDDTAVYYCARDYGDYGMDYWGQGTTVTVSSGGGGSGGGGSGGGGSGDIVMTQSPDSLAVSLGERATINCRASKSVSTSGYSFMHWYQQKPGQPPKLLIYLASNLESGVPDRFSGSGSGTDFTLTISSLQAEDVAVYYCQHSREVPWTFGQGTKVEIKAEPKSPDKTHTCPPCPKDPIYIWAPLAGTCGVLLLSLVITLYCNHRNWRRKRKEKQSETSPKEFLTIYEDVKDLKTRRNHEQEQTFPGGGSTIYSMIQSQSSAPTSQEPAYTLYSLIQPSRKSGSRKRNHSPSFNSTIYEVIGKSQPKAQNPARLSRKELENFDVYSRVKFSRSADAPAYQQGQNQLYNELNLGRREEYDVLDKRRGRDPEMGGKPRRKNPQEGLYNELQKDKMAEAYSEIGMKGERRRGKGHDGLYQGLSTATKDTYDALHMQALPPR

SEQ ID NO: 2815 - protein, 538 aa, Artificial Sequence
  CAT-CD70-326
MALPVTALLLPLALLLHAARPQVQLVQSGAEVKKPGASVKVSCKASGYTFTNYGMNWVRQAPGQGLKWMGWINTYTGEPTYADAFKGRVTMTRDTSISTAYMELSRLRSDDTAVYYCARDYGDYGMDYWGQGTTVTVSSGGGGSGGGGSGGGGSGDIVMTQSPDSLAVSLGERATINCRASKSVSTSGYSFMHWYQQKPGQPPKLLIYLASNLESGVPDRFSGSGSGTDFTLTISSLQAEDVAVYYCQHSREVPWTFGQGTKVEIKESKYGPPCPSCPIYIWAPLAGTCGVLLLSLVITLYCNHRNWRRKRKEKQSETSPKEFLTIYEDVKDLKTRRNHEQEQTFPGGGSTIYSMIQSQSSAPTSQEPAYTLYSLIQPSRKSGSRKRNHSPSFNSTIYEVIGKSQPKAQNPARLSRKELENFDVYSRVKFSRSADAPAYQQGQNQLYNELNLGRREEYDVLDKRRGRDPEMGGKPRRKNPQEGLYNELQKDKMAEAYSEIGMKGERRRGKGHDGLYQGLSTATKDTYDALHMQALPPR

SEQ ID NO: 2816 - protein, 517 aa, Artificial Sequence
  CAT-CD70-326 (without signal peptide)
QVQLVQSGAEVKKPGASVKVSCKASGYTFTNYGMNWVRQAPGQGLKWMGWINTYTGEPTYADAFKGRVTMTRDTSISTAYMELSRLRSDDTAVYYCARDYGDYGMDYWGQGTTVTVSSGGGGSGGGGSGGGGSGDIVMTQSPDSLAVSLGERATINCRASKSVSTSGYSFMHWYQQKPGQPPKLLIYLASNLESGVPDRFSGSGSGTDFTLTISSLQAEDVAVYYCQHSREVPWTFGQGTKVEIKESKYGPPCPSCPIYIWAPLAGTCGVLLLSLVITLYCNHRNWRRKRKEKQSETSPKEFLTIYEDVKDLKTRRNHEQEQTFPGGGSTIYSMIQSQSSAPTSQEPAYTLYSLIQPSRKSGSRKRNHSPSFNSTIYEVIGKSQPKAQNPARLSRKELENFDVYSRVKFSRSADAPAYQQGQNQLYNELNLGRREEYDVLDKRRGRDPEMGGKPRRKNPQEGLYNELQKDKMAEAYSEIGMKGERRRGKGHDGLYQGLSTATKDTYDALHMQALPPR

SEQ ID NO: 2817 - protein, 645 aa, Artificial Sequence
  CAT-CD70-327
MALPVTALLLPLALLLHAARPQVQLVQSGAEVKKPGASVKVSCKASGYTFTNYGMNWVRQAPGQGLKWMGWINTYTGEPTYADAFKGRVTMTRDTSISTAYMELSRLRSDDTAVYYCARDYGDYGMDYWGQGTTVTVSSGGGGSGGGGSGGGGSGDIVMTQSPDSLAVSLGERATINCRASKSVSTSGYSFMHWYQQKPGQPPKLLIYLASNLESGVPDRFSGSGSGTDFTLTISSLQAEDVAVYYCQHSREVPWTFGQGTKVEIKESKYGPPCPSCPGQPREPQVYTLPPSQEEMTKNQVSLTCLVKGFYPSDIAVEWESNGQPENNYKTTPPVLDSDGSFFLYSRLTVDKSRWQEGNVFSCSVMHEALHNHYTQKSLSLSLGKIYIWAPLAGTCGVLLLSLVITLYCNHRNWRRKRKEKQSETSPKEFLTIYEDVKDLKTRRNHEQEQTFPGGGSTIYSMIQSQSSAPTSQEPAYTLYSLIQPSRKSGSRKRNHSPSFNSTIYEVIGKSQPKAQNPARLSRKELENFDVYSRVKFSRSADAPAYQQGQNQLYNELNLGRREEYDVLDKRRGRDPEMGGKPRRKNPQEGLYNELQKDKMAEAYSEIGMKGERRRGKGHDGLYQGLSTATKDTYDALHMQALPPR

SEQ ID NO: 2818 - protein, 624 aa, Artificial Sequence
  CAT-CD70-327 (without signal peptide)
QVQLVQSGAEVKKPGASVKVSCKASGYTFTNYGMNWVRQAPGQGLKWMGWINTYTGEPTYADAFKGRVTMTRDTSISTAYMELSRLRSDDTAVYYCARDYGDYGMDYWGQGTTVTVSSGGGGSGGGGSGGGGSGDIVMTQSPDSLAVSLGERATINCRASKSVSTSGYSFMHWYQQKPGQPPKLLIYLASNLESGVPDRFSGSGSGTDFTLTISSLQAEDVAVYYCQHSREVPWTFGQGTKVEIKESKYGPPCPSCPGQPREPQVYTLPPSQEEMTKNQVSLTCLVKGFYPSDIAVEWESNGQPENNYKTTPPVLDSDGSFFLYSRLTVDKSRWQEGNVFSCSVMHEALHNHYTQKSLSLSLGKIYIWAPLAGTCGVLLLSLVITLYCNHRNWRRKRKEKQSETSPKEFLTIYEDVKDLKTRRNHEQEQTFPGGGSTIYSMIQSQSSAPTSQEPAYTLYSLIQPSRKSGSRKRNHSPSFNSTIYEVIGKSQPKAQNPARLSRKELENFDVYSRVKFSRSADAPAYQQGQNQLYNELNLGRREEYDVLDKRRGRDPEMGGKPRRKNPQEGLYNELQKDKMAEAYSEIGMKGERRRGKGHDGLYQGLSTATKDTYDALHMQALPPR

SEQ ID NO: 2819 - protein, 755 aa, Artificial Sequence
  CAT-CD70-328
MALPVTALLLPLALLLHAARPQVQLVQSGAEVKKPGASVKVSCKASGYTFTNYGMNWVRQAPGQGLKWMGWINTYTGEPTYADAFKGRVTMTRDTSISTAYMELSRLRSDDTAVYYCARDYGDYGMDYWGQGTTVTVSSGGGGSGGGGSGGGGSGDIVMTQSPDSLAVSLGERATINCRASKSVSTSGYSFMHWYQQKPGQPPKLLIYLASNLESGVPDRFSGSGSGTDFTLTISSLQAEDVAVYYCQHSREVPWTFGQGTKVEIKESKYGPPCPSCPAPEFLGGPSVFLFPPKPKDTLMISRTPEVTCVVVDVSQEDPEVQFNWYVDGVEVHNAKTKPREEQFNSTYRVVSVLTVLHQDWLNGKEYKCKVSNKGLPSSIEKTISKAKGQPREPQVYTLPPSQEEMTKNQVSLTCLVKGFYPSDIAVEWESNGQPENNYKTTPPVLDSDGSFFLYSRLTVDKSRWQEGNVFSCSVMHEALHNHYTQKSLSLSLGKIYIWAPLAGTCGVLLLSLVITLYCNHRNWRRKRKEKQSETSPKEFLTIYEDVKDLKTRRNHEQEQTFPGGGSTIYSMIQSQSSAPTSQEPAYTLYSLIQPSRKSGSRKRNHSPSFNSTIYEVIGKSQPKAQNPARLSRKELENFDVYSRVKFSRSADAPAYQQGQNQLYNELNLGRREEYDVLDKRRGRDPEMGGKPRRKNPQEGLYNELQKDKMAEAYSEIGMKGERRRGKGHDGLYQGLSTATKDTYDALHMQALPPR

SEQ ID NO: 2820 - protein, 734 aa, Artificial Sequence
  CAT-CD70-328 (without signal peptide)
QVQLVQSGAEVKKPGASVKVSCKASGYTFTNYGMNWVRQAPGQGLKWMGWINTYTGEPTYADAFKGRVTMTRDTSISTAYMELSRLRSDDTAVYYCARDYGDYGMDYWGQGTTVTVSSGGGGSGGGGSGGGGSGDIVMTQSPDSLAVSLGERATINCRASKSVSTSGYSFMHWYQQKPGQPPKLLIYLASNLESGVPDRFSGSGSGTDFTLTISSLQAEDVAVYYCQHSREVPWTFGQGTKVEIKESKYGPPCPSCPAPEFLGGPSVFLFPPKPKDTLMISRTPEVTCVVVDVSQEDPEVQFNWYVDGVEVHNAKTKPREEQFNSTYRVVSVLTVLHQDWLNGKEYKCKVSNKGLPSSIEKTISKAKGQPREPQVYTLPPSQEEMTKNQVSLTCLVKGFYPSDIAVEWESNGQPENNYKTTPPVLDSDGSFFLYSRLTVDKSRWQEGNVFSCSVMHEALHNHYTQKSLSLSLGKIYIWAPLAGTCGVLLLSLVITLYCNHRNWRRKRKEKQSETSPKEFLTIYEDVKDLKTRRNHEQEQTFPGGGSTIYSMIQSQSSAPTSQEPAYTLYSLIQPSRKSGSRKRNHSPSFNSTIYEVIGKSQPKAQNPARLSRKELENFDVYSRVKFSRSADAPAYQQGQNQLYNELNLGRREEYDVLDKRRGRDPEMGGKPRRKNPQEGLYNELQKDKMAEAYSEIGMKGERRRGKGHDGLYQGLSTATKDTYDALHMQALPPR

SEQ ID NO: 2821 - protein, 755 aa, Artificial Sequence
  CAT-CD70-329
MALPVTALLLPLALLLHAARPQVQLVQSGAEVKKPGASVKVSCKASGYTFTNYGMNWVRQAPGQGLKWMGWINTYTGEPTYADAFKGRVTMTRDTSISTAYMELSRLRSDDTAVYYCARDYGDYGMDYWGQGTTVTVSSGGGGSGGGGSGGGGSGDIVMTQSPDSLAVSLGERATINCRASKSVSTSGYSFMHWYQQKPGQPPKLLIYLASNLESGVPDRFSGSGSGTDFTLTISSLQAEDVAVYYCQHSREVPWTFGQGTKVEIKESKYGPPCPSCPAPEFEGGPSVFLFPPKPKDTLMISRTPEVTCVVVDVSQEDPEVQFNWYVDGVEVHNAKTKPREEQFQSTYRVVSVLTVLHQDWLNGKEYKCKVSNKGLPSSIEKTISKAKGQPREPQVYTLPPSQEEMTKNQVSLTCLVKGFYPSDIAVEWESNGQPENNYKTTPPVLDSDGSFFLYSRLTVDKSRWQEGNVFSCSVMHEALHNHYTQKSLSLSLGKIYIWAPLAGTCGVLLLSLVITLYCNHRNWRRKRKEKQSETSPKEFLTIYEDVKDLKTRRNHEQEQTFPGGGSTIYSMIQSQSSAPTSQEPAYTLYSLIQPSRKSGSRKRNHSPSFNSTIYEVIGKSQPKAQNPARLSRKELENFDVYSRVKFSRSADAPAYQQGQNQLYNELNLGRREEYDVLDKRRGRDPEMGGKPRRKNPQEGLYNELQKDKMAEAYSEIGMKGERRRGKGHDGLYQGLSTATKDTYDALHMQALPPR

SEQ ID NO: 2822 - protein, 734 aa, Artificial Sequence
  CAT-CD70-329 (without signal peptide)
QVQLVQSGAEVKKPGASVKVSCKASGYTFTNYGMNWVRQAPGQGLKWMGWINTYTGEPTYADAFKGRVTMTRDTSISTAYMELSRLRSDDTAVYYCARDYGDYGMDYWGQGTTVTVSSGGGGSGGGGSGGGGSGDIVMTQSPDSLAVSLGERATINCRASKSVSTSGYSFMHWYQQKPGQPPKLLIYLASNLESGVPDRFSGSGSGTDFTLTISSLQAEDVAVYYCQHSREVPWTFGQGTKVEIKESKYGPPCPSCPAPEFEGGPSVFLFPPKPKDTLMISRTPEVTCVVVDVSQEDPEVQFNWYVDGVEVHNAKTKPREEQFQSTYRVVSVLTVLHQDWLNGKEYKCKVSNKGLPSSIEKTISKAKGQPREPQVYTLPPSQEEMTKNQVSLTCLVKGFYPSDIAVEWESNGQPENNYKTTPPVLDSDGSFFLYSRLTVDKSRWQEGNVFSCSVMHEALHNHYTQKSLSLSLGKIYIWAPLAGTCGVLLLSLVITLYCNHRNWRRKRKEKQSETSPKEFLTIYEDVKDLKTRRNHEQEQTFPGGGSTIYSMIQSQSSAPTSQEPAYTLYSLIQPSRKSGSRKRNHSPSFNSTIYEVIGKSQPKAQNPARLSRKELENFDVYSRVKFSRSADAPAYQQGQNQLYNELNLGRREEYDVLDKRRGRDPEMGGKPRRKNPQEGLYNELQKDKMAEAYSEIGMKGERRRGKGHDGLYQGLSTATKDTYDALHMQALPPR

SEQ ID NO: 2823 - protein, 503 aa, Artificial Sequence
  CAT-CD70-330
MALPVTALLLPLALLLHAARPQVQLVQSGAEVKKPGASVKVSCKASGYTFTNYGMNWVRQAPGQGLKWMGWINTYTGEPTYADAFKGRVTMTRDTSISTAYMELSRLRSDDTAVYYCARDYGDYGMDYWGQGTTVTVSSGGGGSGGGGSGGGGSGDIVMTQSPDSLAVSLGERATINCRASKSVSTSGYSFMHWYQQKPGQPPKLLIYLASNLESGVPDRFSGSGSGTDFTLTISSLQAEDVAVYYCQHSREVPWTFGQGTKVEIKTTTPAPRPPTPAPTIASQPLSLRPEACRPAAGGAVHTRGLDFACDIYIWAPLAGTCGVLLLSLVITLYCNHRNYFLGRLVPRGRGAAEAATRKQRITETESPYQELQGQRSDVYSDLNTQRPYYKRVKFSRSADAPAYQQGQNQLYNELNLGRREEYDVLDKRRGRDPEMGGKPRRKNPQEGLYNELQKDKMAEAYSEIGMKGERRRGKGHDGLYQGLSTATKDTYDALHMQALPPR

SEQ ID NO: 2824 - protein, 482 aa, Artificial Sequence
  CAT-CD70-330 (without signal peptide)
QVQLVQSGAEVKKPGASVKVSCKASGYTFTNYGMNWVRQAPGQGLKWMGWINTYTGEPTYADAFKGRVTMTRDTSISTAYMELSRLRSDDTAVYYCARDYGDYGMDYWGQGTTVTVSSGGGGSGGGGSGGGGSGDIVMTQSPDSLAVSLGERATINCRASKSVSTSGYSFMHWYQQKPGQPPKLLIYLASNLESGVPDRFSGSGSGTDFTLTISSLQAEDVAVYYCQHSREVPWTFGQGTKVEIKTTTPAPRPPTPAPTIASQPLSLRPEACRPAAGGAVHTRGLDFACDIYIWAPLAGTCGVLLLSLVITLYCNHRNYFLGRLVPRGRGAAEAATRKQRITETESPYQELQGQRSDVYSDLNTQRPYYKRVKFSRSADAPAYQQGQNQLYNELNLGRREEYDVLDKRRGRDPEMGGKPRRKNPQEGLYNELQKDKMAEAYSEIGMKGERRRGKGHDGLYQGLSTATKDTYDALHMQALPPR

SEQ ID NO: 2825 - protein, 477 aa, Artificial Sequence
  CAT-CD70-331
MALPVTALLLPLALLLHAARPQVQLVQSGAEVKKPGASVKVSCKASGYTFTNYGMNWVRQAPGQGLKWMGWINTYTGEPTYADAFKGRVTMTRDTSISTAYMELSRLRSDDTAVYYCARDYGDYGMDYWGQGTTVTVSSGGGGSGGGGSGGGGSGDIVMTQSPDSLAVSLGERATINCRASKSVSTSGYSFMHWYQQKPGQPPKLLIYLASNLESGVPDRFSGSGSGTDFTLTISSLQAEDVAVYYCQHSREVPWTFGQGTKVEIKAEPKSPDKTHTCPPCPKDPIYIWAPLAGTCGVLLLSLVITLYCNHRNYFLGRLVPRGRGAAEAATRKQRITETESPYQELQGQRSDVYSDLNTQRPYYKRVKFSRSADAPAYQQGQNQLYNELNLGRREEYDVLDKRRGRDPEMGGKPRRKNPQEGLYNELQKDKMAEAYSEIGMKGERRRGKGHDGLYQGLSTATKDTYDALHMQALPPR

SEQ ID NO: 2826 - protein, 456 aa, Artificial Sequence
  CAT-CD70-331 (without signal peptide)
QVQLVQSGAEVKKPGASVKVSCKASGYTFTNYGMNWVRQAPGQGLKWMGWINTYTGEPTYADAFKGRVTMTRDTSISTAYMELSRLRSDDTAVYYCARDYGDYGMDYWGQGTTVTVSSGGGGSGGGGSGGGGSGDIVMTQSPDSLAVSLGERATINCRASKSVSTSGYSFMHWYQQKPGQPPKLLIYLASNLESGVPDRFSGSGSGTDFTLTISSLQAEDVAVYYCQHSREVPWTFGQGTKVEIKAEPKSPDKTHTCPPCPKDPIYIWAPLAGTCGVLLLSLVITLYCNHRNYFLGRLVPRGRGAAEAATRKQRITETESPYQELQGQRSDVYSDLNTQRPYYKRVKFSRSADAPAYQQGQNQLYNELNLGRREEYDVLDKRRGRDPEMGGKPRRKNPQEGLYNELQKDKMAEAYSEIGMKGERRRGKGHDGLYQGLSTATKDTYDALHMQALPPR

SEQ ID NO: 2827 - protein, 470 aa, Artificial Sequence
  CAT-CD70-332
MALPVTALLLPLALLLHAARPQVQLVQSGAEVKKPGASVKVSCKASGYTFTNYGMNWVRQAPGQGLKWMGWINTYTGEPTYADAFKGRVTMTRDTSISTAYMELSRLRSDDTAVYYCARDYGDYGMDYWGQGTTVTVSSGGGGSGGGGSGGGGSGDIVMTQSPDSLAVSLGERATINCRASKSVSTSGYSFMHWYQQKPGQPPKLLIYLASNLESGVPDRFSGSGSGTDFTLTISSLQAEDVAVYYCQHSREVPWTFGQGTKVEIKESKYGPPCPSCPIYIWAPLAGTCGVLLLSLVITLYCNHRNYFLGRLVPRGRGAAEAATRKQRITETESPYQELQGQRSDVYSDLNTQRPYYKRVKFSRSADAPAYQQGQNQLYNELNLGRREEYDVLDKRRGRDPEMGGKPRRKNPQEGLYNELQKDKMAEAYSEIGMKGERRRGKGHDGLYQGLSTATKDTYDALHMQALPPR

SEQ ID NO: 2828 - protein, 449 aa, Artificial Sequence
  CAT-CD70-332 (without signal peptide)
QVQLVQSGAEVKKPGASVKVSCKASGYTFTNYGMNWVRQAPGQGLKWMGWINTYTGEPTYADAFKGRVTMTRDTSISTAYMELSRLRSDDTAVYYCARDYGDYGMDYWGQGTTVTVSSGGGGSGGGGSGGGGSGDIVMTQSPDSLAVSLGERATINCRASKSVSTSGYSFMHWYQQKPGQPPKLLIYLASNLESGVPDRFSGSGSGTDFTLTISSLQAEDVAVYYCQHSREVPWTFGQGTKVEIKESKYGPPCPSCPIYIWAPLAGTCGVLLLSLVITLYCNHRNYFLGRLVPRGRGAAEAATRKQRITETESPYQELQGQRSDVYSDLNTQRPYYKRVKFSRSADAPAYQQGQNQLYNELNLGRREEYDVLDKRRGRDPEMGGKPRRKNPQEGLYNELQKDKMAEAYSEIGMKGERRRGKGHDGLYQGLSTATKDTYDALHMQALPPR

SEQ ID NO: 2829 - protein, 577 aa, Artificial Sequence
  CAT-CD70-333
MALPVTALLLPLALLLHAARPQVQLVQSGAEVKKPGASVKVSCKASGYTFTNYGMNWVRQAPGQGLKWMGWINTYTGEPTYADAFKGRVTMTRDTSISTAYMELSRLRSDDTAVYYCARDYGDYGMDYWGQGTTVTVSSGGGGSGGGGSGGGGSGDIVMTQSPDSLAVSLGERATINCRASKSVSTSGYSFMHWYQQKPGQPPKLLIYLASNLESGVPDRFSGSGSGTDFTLTISSLQAEDVAVYYCQHSREVPWTFGQGTKVEIKESKYGPPCPSCPGQPREPQVYTLPPSQEEMTKNQVSLTCLVKGFYPSDIAVEWESNGQPENNYKTTPPVLDSDGSFFLYSRLTVDKSRWQEGNVFSCSVMHEALHNHYTQKSLSLSLGKIYIWAPLAGTCGVLLLSLVITLYCNHRNYFLGRLVPRGRGAAEAATRKQRITETESPYQELQGQRSDVYSDLNTQRPYYKRVKFSRSADAPAYQQGQNQLYNELNLGRREEYDVLDKRRGRDPEMGGKPRRKNPQEGLYNELQKDKMAEAYSEIGMKGERRRGKGHDGLYQGLSTATKDTYDALHMQALPPR

SEQ ID NO: 2830 - protein, 556 aa, Artificial Sequence
  CAT-CD70-333 (without signal peptide)
QVQLVQSGAEVKKPGASVKVSCKASGYTFTNYGMNWVRQAPGQGLKWMGWINTYTGEPTYADAFKGRVTMTRDTSISTAYMELSRLRSDDTAVYYCARDYGDYGMDYWGQGTTVTVSSGGGGSGGGGSGGGGSGDIVMTQSPDSLAVSLGERATINCRASKSVSTSGYSFMHWYQQKPGQPPKLLIYLASNLESGVPDRFSGSGSGTDFTLTISSLQAEDVAVYYCQHSREVPWTFGQGTKVEIKESKYGPPCPSCPGQPREPQVYTLPPSQEEMTKNQVSLTCLVKGFYPSDIAVEWESNGQPENNYKTTPPVLDSDGSFFLYSRLTVDKSRWQEGNVFSCSVMHEALHNHYTQKSLSLSLGKIYIWAPLAGTCGVLLLSLVITLYCNHRNYFLGRLVPRGRGAAEAATRKQRITETESPYQELQGQRSDVYSDLNTQRPYYKRVKFSRSADAPAYQQGQNQLYNELNLGRREEYDVLDKRRGRDPEMGGKPRRKNPQEGLYNELQKDKMAEAYSEIGMKGERRRGKGHDGLYQGLSTATKDTYDALHMQALPPR

SEQ ID NO: 2831 - protein, 687 aa, Artificial Sequence
  CAT-CD70-334
MALPVTALLLPLALLLHAARPQVQLVQSGAEVKKPGASVKVSCKASGYTFTNYGMNWVRQAPGQGLKWMGWINTYTGEPTYADAFKGRVTMTRDTSISTAYMELSRLRSDDTAVYYCARDYGDYGMDYWGQGTTVTVSSGGGGSGGGGSGGGGSGDIVMTQSPDSLAVSLGERATINCRASKSVSTSGYSFMHWYQQKPGQPPKLLIYLASNLESGVPDRFSGSGSGTDFTLTISSLQAEDVAVYYCQHSREVPWTFGQGTKVEIKESKYGPPCPSCPAPEFLGGPSVFLFPPKPKDTLMISRTPEVTCVVVDVSQEDPEVQFNWYVDGVEVHNAKTKPREEQFNSTYRVVSVLTVLHQDWLNGKEYKCKVSNKGLPSSIEKTISKAKGQPREPQVYTLPPSQEEMTKNQVSLTCLVKGFYPSDIAVEWESNGQPENNYKTTPPVLDSDGSFFLYSRLTVDKSRWQEGNVFSCSVMHEALHNHYTQKSLSLSLGKIYIWAPLAGTCGVLLLSLVITLYCNHRNYFLGRLVPRGRGAAEAATRKQRITETESPYQELQGQRSDVYSDLNTQRPYYKRVKFSRSADAPAYQQGQNQLYNELNLGRREEYDVLDKRRGRDPEMGGKPRRKNPQEGLYNELQKDKMAEAYSEIGMKGERRRGKGHDGLYQGLSTATKDTYDALHMQALPPR

SEQ ID NO: 2832 - protein, 666 aa, Artificial Sequence
  CAT-CD70-334 (without signal peptide)
QVQLVQSGAEVKKPGASVKVSCKASGYTFTNYGMNWVRQAPGQGLKWMGWINTYTGEPTYADAFKGRVTMTRDTSISTAYMELSRLRSDDTAVYYCARDYGDYGMDYWGQGTTVTVSSGGGGSGGGGSGGGGSGDIVMTQSPDSLAVSLGERATINCRASKSVSTSGYSFMHWYQQKPGQPPKLLIYLASNLESGVPDRFSGSGSGTDFTLTISSLQAEDVAVYYCQHSREVPWTFGQGTKVEIKESKYGPPCPSCPAPEFLGGPSVFLFPPKPKDTLMISRTPEVTCVVVDVSQEDPEVQFNWYVDGVEVHNAKTKPREEQFNSTYRVVSVLTVLHQDWLNGKEYKCKVSNKGLPSSIEKTISKAKGQPREPQVYTLPPSQEEMTKNQVSLTCLVKGFYPSDIAVEWESNGQPENNYKTTPPVLDSDGSFFLYSRLTVDKSRWQEGNVFSCSVMHEALHNHYTQKSLSLSLGKIYIWAPLAGTCGVLLLSLVITLYCNHRNYFLGRLVPRGRGAAEAATRKQRITETESPYQELQGQRSDVYSDLNTQRPYYKRVKFSRSADAPAYQQGQNQLYNELNLGRREEYDVLDKRRGRDPEMGGKPRRKNPQEGLYNELQKDKMAEAYSEIGMKGERRRGKGHDGLYQGLSTATKDTYDALHMQALPPR

SEQ ID NO: 2833 - protein, 687 aa, Artificial Sequence
  CAT-CD70-335
MALPVTALLLPLALLLHAARPQVQLVQSGAEVKKPGASVKVSCKASGYTFTNYGMNWVRQAPGQGLKWMGWINTYTGEPTYADAFKGRVTMTRDTSISTAYMELSRLRSDDTAVYYCARDYGDYGMDYWGQGTTVTVSSGGGGSGGGGSGGGGSGDIVMTQSPDSLAVSLGERATINCRASKSVSTSGYSFMHWYQQKPGQPPKLLIYLASNLESGVPDRFSGSGSGTDFTLTISSLQAEDVAVYYCQHSREVPWTFGQGTKVEIKESKYGPPCPSCPAPEFEGGPSVFLFPPKPKDTLMISRTPEVTCVVVDVSQEDPEVQFNWYVDGVEVHNAKTKPREEQFQSTYRVVSVLTVLHQDWLNGKEYKCKVSNKGLPSSIEKTISKAKGQPREPQVYTLPPSQEEMTKNQVSLTCLVKGFYPSDIAVEWESNGQPENNYKTTPPVLDSDGSFFLYSRLTVDKSRWQEGNVFSCSVMHEALHNHYTQKSLSLSLGKIYIWAPLAGTCGVLLLSLVITLYCNHRNYFLGRLVPRGRGAAEAATRKQRITETESPYQELQGQRSDVYSDLNTQRPYYKRVKFSRSADAPAYQQGQNQLYNELNLGRREEYDVLDKRRGRDPEMGGKPRRKNPQEGLYNELQKDKMAEAYSEIGMKGERRRGKGHDGLYQGLSTATKDTYDALHMQALPPR

SEQ ID NO: 2834 - protein, 666 aa, Artificial Sequence
  CAT-CD70-335 (without signal peptide)
QVQLVQSGAEVKKPGASVKVSCKASGYTFTNYGMNWVRQAPGQGLKWMGWINTYTGEPTYADAFKGRVTMTRDTSISTAYMELSRLRSDDTAVYYCARDYGDYGMDYWGQGTTVTVSSGGGGSGGGGSGGGGSGDIVMTQSPDSLAVSLGERATINCRASKSVSTSGYSFMHWYQQKPGQPPKLLIYLASNLESGVPDRFSGSGSGTDFTLTISSLQAEDVAVYYCQHSREVPWTFGQGTKVEIKESKYGPPCPSCPAPEFEGGPSVFLFPPKPKDTLMISRTPEVTCVVVDVSQEDPEVQFNWYVDGVEVHNAKTKPREEQFQSTYRVVSVLTVLHQDWLNGKEYKCKVSNKGLPSSIEKTISKAKGQPREPQVYTLPPSQEEMTKNQVSLTCLVKGFYPSDIAVEWESNGQPENNYKTTPPVLDSDGSFFLYSRLTVDKSRWQEGNVFSCSVMHEALHNHYTQKSLSLSLGKIYIWAPLAGTCGVLLLSLVITLYCNHRNYFLGRLVPRGRGAAEAATRKQRITETESPYQELQGQRSDVYSDLNTQRPYYKRVKFSRSADAPAYQQGQNQLYNELNLGRREEYDVLDKRRGRDPEMGGKPRRKNPQEGLYNELQKDKMAEAYSEIGMKGERRRGKGHDGLYQGLSTATKDTYDALHMQALPPR

SEQ ID NO: 2835 - protein, 451 aa, Artificial Sequence
  CAT-CD70-336
MALPVTALLLPLALLLHAARPQVQLVQSGAEVKKPGASVKVSCKASGYTFTNYGMNWVRQAPGQGLKWMGWINTYTGEPTYADAFKGRVTMTRDTSISTAYMELSRLRSDDTAVYYCARDYGDYGMDYWGQGTTVTVSSGGGGSGGGGSGGGGSGDIVMTQSPDSLAVSLGERATINCRASKSVSTSGYSFMHWYQQKPGQPPKLLIYLASNLESGVPDRFSGSGSGTDFTLTISSLQAEDVAVYYCQHSREVPWTFGQGTKVEIKTTTPAPRPPTPAPTIASQPLSLRPEACRPAAGGAVHTRGLDFACDIYIWAPLAGTCGVLLLSLVITLYCNHRNRVKFSRSADAPAYQQGQNQLYNELNLGRREEYDVLDKRRGRDPEMGGKPRRKNPQEGLYNELQKDKMAEAYSEIGMKGERRRGKGHDGLYQGLSTATKDTYDALHMQALPPR

SEQ ID NO: 2836 - protein, 430 aa, Artificial Sequence
  CAT-CD70-336 (without signal peptide)
QVQLVQSGAEVKKPGASVKVSCKASGYTFTNYGMNWVRQAPGQGLKWMGWINTYTGEPTYADAFKGRVTMTRDTSISTAYMELSRLRSDDTAVYYCARDYGDYGMDYWGQGTTVTVSSGGGGSGGGGSGGGGSGDIVMTQSPDSLAVSLGERATINCRASKSVSTSGYSFMHWYQQKPGQPPKLLIYLASNLESGVPDRFSGSGSGTDFTLTISSLQAEDVAVYYCQHSREVPWTFGQGTKVEIKTTTPAPRPPTPAPTIASQPLSLRPEACRPAAGGAVHTRGLDFACDIYIWAPLAGTCGVLLLSLVITLYCNHRNRVKFSRSADAPAYQQGQNQLYNELNLGRREEYDVLDKRRGRDPEMGGKPRRKNPQEGLYNELQKDKMAEAYSEIGMKGERRRGKGHDGLYQGLSTATKDTYDALHMQALPPR

SEQ ID NO: 2837 - protein, 425 aa, Artificial Sequence
  CAT-CD70-337
MALPVTALLLPLALLLHAARPQVQLVQSGAEVKKPGASVKVSCKASGYTFTNYGMNWVRQAPGQGLKWMGWINTYTGEPTYADAFKGRVTMTRDTSISTAYMELSRLRSDDTAVYYCARDYGDYGMDYWGQGTTVTVSSGGGGSGGGGSGGGGSGDIVMTQSPDSLAVSLGERATINCRASKSVSTSGYSFMHWYQQKPGQPPKLLIYLASNLESGVPDRFSGSGSGTDFTLTISSLQAEDVAVYYCQHSREVPWTFGQGTKVEIKAEPKSPDKTHTCPPCPKDPIYIWAPLAGTCGVLLLSLVITLYCNHRNRVKFSRSADAPAYQQGQNQLYNELNLGRREEYDVLDKRRGRDPEMGGKPRRKNPQEGLYNELQKDKMAEAYSEIGMKGERRRGKGHDGLYQGLSTATKDTYDALHMQALPPR

SEQ ID NO: 2838 - protein, 404 aa, Artificial Sequence
  CAT-CD70-337 (without signal peptide)
QVQLVQSGAEVKKPGASVKVSCKASGYTFTNYGMNWVRQAPGQGLKWMGWINTYTGEPTYADAFKGRVTMTRDTSISTAYMELSRLRSDDTAVYYCARDYGDYGMDYWGQGTTVTVSSGGGGSGGGGSGGGGSGDIVMTQSPDSLAVSLGERATINCRASKSVSTSGYSFMHWYQQKPGQPPKLLIYLASNLESGVPDRFSGSGSGTDFTLTISSLQAEDVAVYYCQHSREVPWTFGQGTKVEIKAEPKSPDKTHTCPPCPKDPIYIWAPLAGTCGVLLLSLVITLYCNHRNRVKFSRSADAPAYQQGQNQLYNELNLGRREEYDVLDKRRGRDPEMGGKPRRKNPQEGLYNELQKDKMAEAYSEIGMKGERRRGKGHDGLYQGLSTATKDTYDALHMQALPPR

SEQ ID NO: 2839 - protein, 418 aa, Artificial Sequence
  CAT-CD70-338
MALPVTALLLPLALLLHAARPQVQLVQSGAEVKKPGASVKVSCKASGYTFTNYGMNWVRQAPGQGLKWMGWINTYTGEPTYADAFKGRVTMTRDTSISTAYMELSRLRSDDTAVYYCARDYGDYGMDYWGQGTTVTVSSGGGGSGGGGSGGGGSGDIVMTQSPDSLAVSLGERATINCRASKSVSTSGYSFMHWYQQKPGQPPKLLIYLASNLESGVPDRFSGSGSGTDFTLTISSLQAEDVAVYYCQHSREVPWTFGQGTKVEIKESKYGPPCPSCPIYIWAPLAGTCGVLLLSLVITLYCNHRNRVKFSRSADAPAYQQGQNQLYNELNLGRREEYDVLDKRRGRDPEMGGKPRRKNPQEGLYNELQKDKMAEAYSEIGMKGERRRGKGHDGLYQGLSTATKDTYDALHMQALPPR

SEQ ID NO: 2840 - protein, 397 aa, Artificial Sequence
  CAT-CD70-338 (without signal peptide)
QVQLVQSGAEVKKPGASVKVSCKASGYTFTNYGMNWVRQAPGQGLKWMGWINTYTGEPTYADAFKGRVTMTRDTSISTAYMELSRLRSDDTAVYYCARDYGDYGMDYWGQGTTVTVSSGGGGSGGGGSGGGGSGDIVMTQSPDSLAVSLGERATINCRASKSVSTSGYSFMHWYQQKPGQPPKLLIYLASNLESGVPDRFSGSGSGTDFTLTISSLQAEDVAVYYCQHSREVPWTFGQGTKVEIKESKYGPPCPSCPIYIWAPLAGTCGVLLLSLVITLYCNHRNRVKFSRSADAPAYQQGQNQLYNELNLGRREEYDVLDKRRGRDPEMGGKPRRKNPQEGLYNELQKDKMAEAYSEIGMKGERRRGKGHDGLYQGLSTATKDTYDALHMQALPPR

SEQ ID NO: 2841 - protein, 525 aa, Artificial Sequence
  CAT-CD70-339
MALPVTALLLPLALLLHAARPQVQLVQSGAEVKKPGASVKVSCKASGYTFTNYGMNWVRQAPGQGLKWMGWINTYTGEPTYADAFKGRVTMTRDTSISTAYMELSRLRSDDTAVYYCARDYGDYGMDYWGQGTTVTVSSGGGGSGGGGSGGGGSGDIVMTQSPDSLAVSLGERATINCRASKSVSTSGYSFMHWYQQKPGQPPKLLIYLASNLESGVPDRFSGSGSGTDFTLTISSLQAEDVAVYYCQHSREVPWTFGQGTKVEIKESKYGPPCPSCPGQPREPQVYTLPPSQEEMTKNQVSLTCLVKGFYPSDIAVEWESNGQPENNYKTTPPVLDSDGSFFLYSRLTVDKSRWQEGNVFSCSVMHEALHNHYTQKSLSLSLGKIYIWAPLAGTCGVLLLSLVITLYCNHRNRVKFSRSADAPAYQQGQNQLYNELNLGRREEYDVLDKRRGRDPEMGGKPRRKNPQEGLYNELQKDKMAEAYSEIGMKGERRRGKGHDGLYQGLSTATKDTYDALHMQALPPR

SEQ ID NO: 2842 - protein, 504 aa, Artificial Sequence
  CAT-CD70-339 (without signal peptide)
QVQLVQSGAEVKKPGASVKVSCKASGYTFTNYGMNWVRQAPGQGLKWMGWINTYTGEPTYADAFKGRVTMTRDTSISTAYMELSRLRSDDTAVYYCARDYGDYGMDYWGQGTTVTVSSGGGGSGGGGSGGGGSGDIVMTQSPDSLAVSLGERATINCRASKSVSTSGYSFMHWYQQKPGQPPKLLIYLASNLESGVPDRFSGSGSGTDFTLTISSLQAEDVAVYYCQHSREVPWTFGQGTKVEIKESKYGPPCPSCPGQPREPQVYTLPPSQEEMTKNQVSLTCLVKGFYPSDIAVEWESNGQPENNYKTTPPVLDSDGSFFLYSRLTVDKSRWQEGNVFSCSVMHEALHNHYTQKSLSLSLGKIYIWAPLAGTCGVLLLSLVITLYCNHRNRVKFSRSADAPAYQQGQNQLYNELNLGRREEYDVLDKRRGRDPEMGGKPRRKNPQEGLYNELQKDKMAEAYSEIGMKGERRRGKGHDGLYQGLSTATKDTYDALHMQALPPR

SEQ ID NO: 2843 - protein, 635 aa, Artificial Sequence
  CAT-CD70-340
MALPVTALLLPLALLLHAARPQVQLVQSGAEVKKPGASVKVSCKASGYTFTNYGMNWVRQAPGQGLKWMGWINTYTGEPTYADAFKGRVTMTRDTSISTAYMELSRLRSDDTAVYYCARDYGDYGMDYWGQGTTVTVSSGGGGSGGGGSGGGGSGDIVMTQSPDSLAVSLGERATINCRASKSVSTSGYSFMHWYQQKPGQPPKLLIYLASNLESGVPDRFSGSGSGTDFTLTISSLQAEDVAVYYCQHSREVPWTFGQGTKVEIKESKYGPPCPSCPAPEFLGGPSVFLFPPKPKDTLMISRTPEVTCVVVDVSQEDPEVQFNWYVDGVEVHNAKTKPREEQFNSTYRVVSVLTVLHQDWLNGKEYKCKVSNKGLPSSIEKTISKAKGQPREPQVYTLPPSQEEMTKNQVSLTCLVKGFYPSDIAVEWESNGQPENNYKTTPPVLDSDGSFFLYSRLTVDKSRWQEGNVFSCSVMHEALHNHYTQKSLSLSLGKIYIWAPLAGTCGVLLLSLVITLYCNHRNRVKFSRSADAPAYQQGQNQLYNELNLGRREEYDVLDKRRGRDPEMGGKPRRKNPQEGLYNELQKDKMAEAYSEIGMKGERRRGKGHDGLYQGLSTATKDTYDALHMQALPPR

SEQ ID NO: 2844 - protein, 614 aa, Artificial Sequence
  CAT-CD70-340 (without signal peptide)
QVQLVQSGAEVKKPGASVKVSCKASGYTFTNYGMNWVRQAPGQGLKWMGWINTYTGEPTYADAFKGRVTMTRDTSISTAYMELSRLRSDDTAVYYCARDYGDYGMDYWGQGTTVTVSSGGGGSGGGGSGGGGSGDIVMTQSPDSLAVSLGERATINCRASKSVSTSGYSFMHWYQQKPGQPPKLLIYLASNLESGVPDRFSGSGSGTDFTLTISSLQAEDVAVYYCQHSREVPWTFGQGTKVEIKESKYGPPCPSCPAPEFLGGPSVFLFPPKPKDTLMISRTPEVTCVVVDVSQEDPEVQFNWYVDGVEVHNAKTKPREEQFNSTYRVVSVLTVLHQDWLNGKEYKCKVSNKGLPSSIEKTISKAKGQPREPQVYTLPPSQEEMTKNQVSLTCLVKGFYPSDIAVEWESNGQPENNYKTTPPVLDSDGSFFLYSRLTVDKSRWQEGNVFSCSVMHEALHNHYTQKSLSLSLGKIYIWAPLAGTCGVLLLSLVITLYCNHRNRVKFSRSADAPAYQQGQNQLYNELNLGRREEYDVLDKRRGRDPEMGGKPRRKNPQEGLYNELQKDKMAEAYSEIGMKGERRRGKGHDGLYQGLSTATKDTYDALHMQALPPR

SEQ ID NO: 2845 - protein, 635 aa, Artificial Sequence
  CAT-CD70-341
MALPVTALLLPLALLLHAARPQVQLVQSGAEVKKPGASVKVSCKASGYTFTNYGMNWVRQAPGQGLKWMGWINTYTGEPTYADAFKGRVTMTRDTSISTAYMELSRLRSDDTAVYYCARDYGDYGMDYWGQGTTVTVSSGGGGSGGGGSGGGGSGDIVMTQSPDSLAVSLGERATINCRASKSVSTSGYSFMHWYQQKPGQPPKLLIYLASNLESGVPDRFSGSGSGTDFTLTISSLQAEDVAVYYCQHSREVPWTFGQGTKVEIKESKYGPPCPSCPAPEFEGGPSVFLFPPKPKDTLMISRTPEVTCVVVDVSQEDPEVQFNWYVDGVEVHNAKTKPREEQFQSTYRVVSVLTVLHQDWLNGKEYKCKVSNKGLPSSIEKTISKAKGQPREPQVYTLPPSQEEMTKNQVSLTCLVKGFYPSDIAVEWESNGQPENNYKTTPPVLDSDGSFFLYSRLTVDKSRWQEGNVFSCSVMHEALHNHYTQKSLSLSLGKIYIWAPLAGTCGVLLLSLVITLYCNHRNRVKFSRSADAPAYQQGQNQLYNELNLGRREEYDVLDKRRGRDPEMGGKPRRKNPQEGLYNELQKDKMAEAYSEIGMKGERRRGKGHDGLYQGLSTATKDTYDALHMQALPPR

SEQ ID NO: 2846 - protein, 614 aa, Artificial Sequence
  CAT-CD70-341 (without signal peptide)
QVQLVQSGAEVKKPGASVKVSCKASGYTFTNYGMNWVRQAPGQGLKWMGWINTYTGEPTYADAFKGRVTMTRDTSISTAYMELSRLRSDDTAVYYCARDYGDYGMDYWGQGTTVTVSSGGGGSGGGGSGGGGSGDIVMTQSPDSLAVSLGERATINCRASKSVSTSGYSFMHWYQQKPGQPPKLLIYLASNLESGVPDRFSGSGSGTDFTLTISSLQAEDVAVYYCQHSREVPWTFGQGTKVEIKESKYGPPCPSCPAPEFEGGPSVFLFPPKPKDTLMISRTPEVTCVVVDVSQEDPEVQFNWYVDGVEVHNAKTKPREEQFQSTYRVVSVLTVLHQDWLNGKEYKCKVSNKGLPSSIEKTISKAKGQPREPQVYTLPPSQEEMTKNQVSLTCLVKGFYPSDIAVEWESNGQPENNYKTTPPVLDSDGSFFLYSRLTVDKSRWQEGNVFSCSVMHEALHNHYTQKSLSLSLGKIYIWAPLAGTCGVLLLSLVITLYCNHRNRVKFSRSADAPAYQQGQNQLYNELNLGRREEYDVLDKRRGRDPEMGGKPRRKNPQEGLYNELQKDKMAEAYSEIGMKGERRRGKGHDGLYQGLSTATKDTYDALHMQALPPR

SEQ ID NO: 2847 - protein, 434 aa, Artificial Sequence
  CAT-CD70-342
MALPVTALLLPLALLLHAARPQVQLVQSGAEVKKPGASVKVSCKASGYTFTNYGMNWVRQAPGQGLKWMGWINTYTGEPTYADAFKGRVTMTRDTSISTAYMELSRLRSDDTAVYYCARDYGDYGMDYWGQGTTVTVSSGGGGSGGGGSGGGGSGDIVMTQSPDSLAVSLGERATINCRASKSVSTSGYSFMHWYQQKPGQPPKLLIYLASNLESGVPDRFSGSGSGTDFTLTISSLQAEDVAVYYCQHSREVPWTFGQGTKVEIKTTTPAPRPPTPAPTIASQPLSLRPEACRPAAGGAVHTRGLDFACDIYIWAPLAGTCGVLLLSLVITLYCNHRNRKRGRKKLLYIFKQPFMRPVQTTQEEDGCSCRFPEEEEGGCELYFLGRLVPRGRGAAEAATRKQRITETESPYQELQGQRSDVYSDLNTQRPYYK

SEQ ID NO: 2848 - protein, 413 aa, Artificial Sequence
  CAT-CD70-342 (without signal peptide)
QVQLVQSGAEVKKPGASVKVSCKASGYTFTNYGMNWVRQAPGQGLKWMGWINTYTGEPTYADAFKGRVTMTRDTSISTAYMELSRLRSDDTAVYYCARDYGDYGMDYWGQGTTVTVSSGGGGSGGGGSGGGGSGDIVMTQSPDSLAVSLGERATINCRASKSVSTSGYSFMHWYQQKPGQPPKLLIYLASNLESGVPDRFSGSGSGTDFTLTISSLQAEDVAVYYCQHSREVPWTFGQGTKVEIKTTTPAPRPPTPAPTIASQPLSLRPEACRPAAGGAVHTRGLDFACDIYIWAPLAGTCGVLLLSLVITLYCNHRNRKRGRKKLLYIFKQPFMRPVQTTQEEDGCSCRFPEEEEGGCELYFLGRLVPRGRGAAEAATRKQRITETESPYQELQGQRSDVYSDLNTQRPYYK

SEQ ID NO: 2849 - protein, 408 aa, Artificial Sequence
  CAT-CD70-343
MALPVTALLLPLALLLHAARPQVQLVQSGAEVKKPGASVKVSCKASGYTFTNYGMNWVRQAPGQGLKWMGWINTYTGEPTYADAFKGRVTMTRDTSISTAYMELSRLRSDDTAVYYCARDYGDYGMDYWGQGTTVTVSSGGGGSGGGGSGGGGSGDIVMTQSPDSLAVSLGERATINCRASKSVSTSGYSFMHWYQQKPGQPPKLLIYLASNLESGVPDRFSGSGSGTDFTLTISSLQAEDVAVYYCQHSREVPWTFGQGTKVEIKAEPKSPDKTHTCPPCPKDPIYIWAPLAGTCGVLLLSLVITLYCNHRNRKRGRKKLLYIFKQPFMRPVQTTQEEDGCSCRFPEEEEGGCELYFLGRLVPRGRGAAEAATRKQRITETESPYQELQGQRSDVYSDLNTQRPYYK

SEQ ID NO: 2850 - protein, 387 aa, Artificial Sequence
  CAT-CD70-343 (without signal peptide)
QVQLVQSGAEVKKPGASVKVSCKASGYTFTNYGMNWVRQAPGQGLKWMGWINTYTGEPTYADAFKGRVTMTRDTSISTAYMELSRLRSDDTAVYYCARDYGDYGMDYWGQGTTVTVSSGGGGSGGGGSGGGGSGDIVMTQSPDSLAVSLGERATINCRASKSVSTSGYSFMHWYQQKPGQPPKLLIYLASNLESGVPDRFSGSGSGTDFTLTISSLQAEDVAVYYCQHSREVPWTFGQGTKVEIKAEPKSPDKTHTCPPCPKDPIYIWAPLAGTCGVLLLSLVITLYCNHRNRKRGRKKLLYIFKQPFMRPVQTTQEEDGCSCRFPEEEEGGCELYFLGRLVPRGRGAAEAATRKQRITETESPYQELQGQRSDVYSDLNTQRPYYK

SEQ ID NO: 2851 - protein, 401 aa, Artificial Sequence
  CAT-CD70-344
MALPVTALLLPLALLLHAARPQVQLVQSGAEVKKPGASVKVSCKASGYTFTNYGMNWVRQAPGQGLKWMGWINTYTGEPTYADAFKGRVTMTRDTSISTAYMELSRLRSDDTAVYYCARDYGDYGMDYWGQGTTVTVSSGGGGSGGGGSGGGGSGDIVMTQSPDSLAVSLGERATINCRASKSVSTSGYSFMHWYQQKPGQPPKLLIYLASNLESGVPDRFSGSGSGTDFTLTISSLQAEDVAVYYCQHSREVPWTFGQGTKVEIKESKYGPPCPSCPIYIWAPLAGTCGVLLLSLVITLYCNHRNRKRGRKKLLYIFKQPFMRPVQTTQEEDGCSCRFPEEEEGGCELYFLGRLVPRGRGAAEAATRKQRITETESPYQELQGQRSDVYSDLNTQRPYYK

SEQ ID NO: 2852 - protein, 380 aa, Artificial Sequence
  CAT-CD70-344 (without signal peptide)
QVQLVQSGAEVKKPGASVKVSCKASGYTFTNYGMNWVRQAPGQGLKWMGWINTYTGEPTYADAFKGRVTMTRDTSISTAYMELSRLRSDDTAVYYCARDYGDYGMDYWGQGTTVTVSSGGGGSGGGGSGGGGSGDIVMTQSPDSLAVSLGERATINCRASKSVSTSGYSFMHWYQQKPGQPPKLLIYLASNLESGVPDRFSGSGSGTDFTLTISSLQAEDVAVYYCQHSREVPWTFGQGTKVEIKESKYGPPCPSCPIYIWAPLAGTCGVLLLSLVITLYCNHRNRKRGRKKLLYIFKQPFMRPVQTTQEEDGCSCRFPEEEEGGCELYFLGRLVPRGRGAAEAATRKQRITETESPYQELQGQRSDVYSDLNTQRPYYK

SEQ ID NO: 2853 - protein, 508 aa, Artificial Sequence
  CAT-CD70-345
MALPVTALLLPLALLLHAARPQVQLVQSGAEVKKPGASVKVSCKASGYTFTNYGMNWVRQAPGQGLKWMGWINTYTGEPTYADAFKGRVTMTRDTSISTAYMELSRLRSDDTAVYYCARDYGDYGMDYWGQGTTVTVSSGGGGSGGGGSGGGGSGDIVMTQSPDSLAVSLGERATINCRASKSVSTSGYSFMHWYQQKPGQPPKLLIYLASNLESGVPDRFSGSGSGTDFTLTISSLQAEDVAVYYCQHSREVPWTFGQGTKVEIKESKYGPPCPSCPGQPREPQVYTLPPSQEEMTKNQVSLTCLVKGFYPSDIAVEWESNGQPENNYKTTPPVLDSDGSFFLYSRLTVDKSRWQEGNVFSCSVMHEALHNHYTQKSLSLSLGKIYIWAPLAGTCGVLLLSLVITLYCNHRNRKRGRKKLLYIFKQPFMRPVQTTQEEDGCSCRFPEEEEGGCELYFLGRLVPRGRGAAEAATRKQRITETESPYQELQGQRSDVYSDLNTQRPYYK

SEQ ID NO: 2854 - protein, 487 aa, Artificial Sequence
  CAT-CD70-345 (without signal peptide)
QVQLVQSGAEVKKPGASVKVSCKASGYTFTNYGMNWVRQAPGQGLKWMGWINTYTGEPTYADAFKGRVTMTRDTSISTAYMELSRLRSDDTAVYYCARDYGDYGMDYWGQGTTVTVSSGGGGSGGGGSGGGGSGDIVMTQSPDSLAVSLGERATINCRASKSVSTSGYSFMHWYQQKPGQPPKLLIYLASNLESGVPDRFSGSGSGTDFTLTISSLQAEDVAVYYCQHSREVPWTFGQGTKVEIKESKYGPPCPSCPGQPREPQVYTLPPSQEEMTKNQVSLTCLVKGFYPSDIAVEWESNGQPENNYKTTPPVLDSDGSFFLYSRLTVDKSRWQEGNVFSCSVMHEALHNHYTQKSLSLSLGKIYIWAPLAGTCGVLLLSLVITLYCNHRNRKRGRKKLLYIFKQPFMRPVQTTQEEDGCSCRFPEEEEGGCELYFLGRLVPRGRGAAEAATRKQRITETESPYQELQGQRSDVYSDLNTQRPYYK

SEQ ID NO: 2855 - protein, 618 aa, Artificial Sequence
  CAT-CD70-346
MALPVTALLLPLALLLHAARPQVQLVQSGAEVKKPGASVKVSCKASGYTFTNYGMNWVRQAPGQGLKWMGWINTYTGEPTYADAFKGRVTMTRDTSISTAYMELSRLRSDDTAVYYCARDYGDYGMDYWGQGTTVTVSSGGGGSGGGGSGGGGSGDIVMTQSPDSLAVSLGERATINCRASKSVSTSGYSFMHWYQQKPGQPPKLLIYLASNLESGVPDRFSGSGSGTDFTLTISSLQAEDVAVYYCQHSREVPWTFGQGTKVEIKESKYGPPCPSCPAPEFLGGPSVFLFPPKPKDTLMISRTPEVTCVVVDVSQEDPEVQFNWYVDGVEVHNAKTKPREEQFNSTYRVVSVLTVLHQDWLNGKEYKCKVSNKGLPSSIEKTISKAKGQPREPQVYTLPPSQEEMTKNQVSLTCLVKGFYPSDIAVEWESNGQPENNYKTTPPVLDSDGSFFLYSRLTVDKSRWQEGNVFSCSVMHEALHNHYTQKSLSLSLGKIYIWAPLAGTCGVLLLSLVITLYCNHRNRKRGRKKLLYIFKQPFMRPVQTTQEEDGCSCRFPEEEEGGCELYFLGRLVPRGRGAAEAATRKQRITETESPYQELQGQRSDVYSDLNTQRPYYK

SEQ ID NO: 2856 - protein, 597 aa, Artificial Sequence
  CAT-CD70-346 (without signal peptide)
QVQLVQSGAEVKKPGASVKVSCKASGYTFTNYGMNWVRQAPGQGLKWMGWINTYTGEPTYADAFKGRVTMTRDTSISTAYMELSRLRSDDTAVYYCARDYGDYGMDYWGQGTTVTVSSGGGGSGGGGSGGGGSGDIVMTQSPDSLAVSLGERATINCRASKSVSTSGYSFMHWYQQKPGQPPKLLIYLASNLESGVPDRFSGSGSGTDFTLTISSLQAEDVAVYYCQHSREVPWTFGQGTKVEIKESKYGPPCPSCPAPEFLGGPSVFLFPPKPKDTLMISRTPEVTCVVVDVSQEDPEVQFNWYVDGVEVHNAKTKPREEQFNSTYRVVSVLTVLHQDWLNGKEYKCKVSNKGLPSSIEKTISKAKGQPREPQVYTLPPSQEEMTKNQVSLTCLVKGFYPSDIAVEWESNGQPENNYKTTPPVLDSDGSFFLYSRLTVDKSRWQEGNVFSCSVMHEALHNHYTQKSLSLSLGKIYIWAPLAGTCGVLLLSLVITLYCNHRNRKRGRKKLLYIFKQPFMRPVQTTQEEDGCSCRFPEEEEGGCELYFLGRLVPRGRGAAEAATRKQRITETESPYQELQGQRSDVYSDLNTQRPYYK

SEQ ID NO: 2857 - protein, 618 aa, Artificial Sequence
  CAT-CD70-347
MALPVTALLLPLALLLHAARPQVQLVQSGAEVKKPGASVKVSCKASGYTFTNYGMNWVRQAPGQGLKWMGWINTYTGEPTYADAFKGRVTMTRDTSISTAYMELSRLRSDDTAVYYCARDYGDYGMDYWGQGTTVTVSSGGGGSGGGGSGGGGSGDIVMTQSPDSLAVSLGERATINCRASKSVSTSGYSFMHWYQQKPGQPPKLLIYLASNLESGVPDRFSGSGSGTDFTLTISSLQAEDVAVYYCQHSREVPWTFGQGTKVEIKESKYGPPCPSCPAPEFEGGPSVFLFPPKPKDTLMISRTPEVTCVVVDVSQEDPEVQFNWYVDGVEVHNAKTKPREEQFQSTYRVVSVLTVLHQDWLNGKEYKCKVSNKGLPSSIEKTISKAKGQPREPQVYTLPPSQEEMTKNQVSLTCLVKGFYPSDIAVEWESNGQPENNYKTTPPVLDSDGSFFLYSRLTVDKSRWQEGNVFSCSVMHEALHNHYTQKSLSLSLGKIYIWAPLAGTCGVLLLSLVITLYCNHRNRKRGRKKLLYIFKQPFMRPVQTTQEEDGCSCRFPEEEEGGCELYFLGRLVPRGRGAAEAATRKQRITETESPYQELQGQRSDVYSDLNTQRPYYK

SEQ ID NO: 2858 - protein, 597 aa, Artificial Sequence
  CAT-CD70-347 (without signal peptide)
QVQLVQSGAEVKKPGASVKVSCKASGYTFTNYGMNWVRQAPGQGLKWMGWINTYTGEPTYADAFKGRVTMTRDTSISTAYMELSRLRSDDTAVYYCARDYGDYGMDYWGQGTTVTVSSGGGGSGGGGSGGGGSGDIVMTQSPDSLAVSLGERATINCRASKSVSTSGYSFMHWYQQKPGQPPKLLIYLASNLESGVPDRFSGSGSGTDFTLTISSLQAEDVAVYYCQHSREVPWTFGQGTKVEIKESKYGPPCPSCPAPEFEGGPSVFLFPPKPKDTLMISRTPEVTCVVVDVSQEDPEVQFNWYVDGVEVHNAKTKPREEQFQSTYRVVSVLTVLHQDWLNGKEYKCKVSNKGLPSSIEKTISKAKGQPREPQVYTLPPSQEEMTKNQVSLTCLVKGFYPSDIAVEWESNGQPENNYKTTPPVLDSDGSFFLYSRLTVDKSRWQEGNVFSCSVMHEALHNHYTQKSLSLSLGKIYIWAPLAGTCGVLLLSLVITLYCNHRNRKRGRKKLLYIFKQPFMRPVQTTQEEDGCSCRFPEEEEGGCELYFLGRLVPRGRGAAEAATRKQRITETESPYQELQGQRSDVYSDLNTQRPYYK

SEQ ID NO: 2859 - protein, 433 aa, Artificial Sequence
  CAT-CD70-348
MALPVTALLLPLALLLHAARPQVQLVQSGAEVKKPGASVKVSCKASGYTFTNYGMNWVRQAPGQGLKWMGWINTYTGEPTYADAFKGRVTMTRDTSISTAYMELSRLRSDDTAVYYCARDYGDYGMDYWGQGTTVTVSSGGGGSGGGGSGGGGSGDIVMTQSPDSLAVSLGERATINCRASKSVSTSGYSFMHWYQQKPGQPPKLLIYLASNLESGVPDRFSGSGSGTDFTLTISSLQAEDVAVYYCQHSREVPWTFGQGTKVEIKTTTPAPRPPTPAPTIASQPLSLRPEACRPAAGGAVHTRGLDFACDIYIWAPLAGTCGVLLLSLVITLYCNHRNALYLLRRDQRLPPDAHKPPGGGSFRTPIQEEQADAHSTLAKIYFLGRLVPRGRGAAEAATRKQRITETESPYQELQGQRSDVYSDLNTQRPYYK

SEQ ID NO: 2860 - protein, 412 aa, Artificial Sequence
  CAT-CD70-348 (without signal peptide)
QVQLVQSGAEVKKPGASVKVSCKASGYTFTNYGMNWVRQAPGQGLKWMGWINTYTGEPTYADAFKGRVTMTRDTSISTAYMELSRLRSDDTAVYYCARDYGDYGMDYWGQGTTVTVSSGGGGSGGGGSGGGGSGDIVMTQSPDSLAVSLGERATINCRASKSVSTSGYSFMHWYQQKPGQPPKLLIYLASNLESGVPDRFSGSGSGTDFTLTISSLQAEDVAVYYCQHSREVPWTFGQGTKVEIKTTTPAPRPPTPAPTIASQPLSLRPEACRPAAGGAVHTRGLDFACDIYIWAPLAGTCGVLLLSLVITLYCNHRNALYLLRRDQRLPPDAHKPPGGGSFRTPIQEEQADAHSTLAKIYFLGRLVPRGRGAAEAATRKQRITETESPYQELQGQRSDVYSDLNTQRPYYK

SEQ ID NO: 2861 - protein, 407 aa, Artificial Sequence
  CAT-CD70-349
MALPVTALLLPLALLLHAARPQVQLVQSGAEVKKPGASVKVSCKASGYTFTNYGMNWVRQAPGQGLKWMGWINTYTGEPTYADAFKGRVTMTRDTSISTAYMELSRLRSDDTAVYYCARDYGDYGMDYWGQGTTVTVSSGGGGSGGGGSGGGGSGDIVMTQSPDSLAVSLGERATINCRASKSVSTSGYSFMHWYQQKPGQPPKLLIYLASNLESGVPDRFSGSGSGTDFTLTISSLQAEDVAVYYCQHSREVPWTFGQGTKVEIKAEPKSPDKTHTCPPCPKDPIYIWAPLAGTCGVLLLSLVITLYCNHRNALYLLRRDQRLPPDAHKPPGGGSFRTPIQEEQADAHSTLAKIYFLGRLVPRGRGAAEAATRKQRITETESPYQELQGQRSDVYSDLNTQRPYYK

SEQ ID NO: 2862 - protein, 386 aa, Artificial Sequence
  CAT-CD70-349 (without signal peptide)
QVQLVQSGAEVKKPGASVKVSCKASGYTFTNYGMNWVRQAPGQGLKWMGWINTYTGEPTYADAFKGRVTMTRDTSISTAYMELSRLRSDDTAVYYCARDYGDYGMDYWGQGTTVTVSSGGGGSGGGGSGGGGSGDIVMTQSPDSLAVSLGERATINCRASKSVSTSGYSFMHWYQQKPGQPPKLLIYLASNLESGVPDRFSGSGSGTDFTLTISSLQAEDVAVYYCQHSREVPWTFGQGTKVEIKAEPKSPDKTHTCPPCPKDPIYIWAPLAGTCGVLLLSLVITLYCNHRNALYLLRRDQRLPPDAHKPPGGGSFRTPIQEEQADAHSTLAKIYFLGRLVPRGRGAAEAATRKQRITETESPYQELQGQRSDVYSDLNTQRPYYK

SEQ ID NO: 2863 - protein, 400 aa, Artificial Sequence
  CAT-CD70-350
MALPVTALLLPLALLLHAARPQVQLVQSGAEVKKPGASVKVSCKASGYTFTNYGMNWVRQAPGQGLKWMGWINTYTGEPTYADAFKGRVTMTRDTSISTAYMELSRLRSDDTAVYYCARDYGDYGMDYWGQGTTVTVSSGGGGSGGGGSGGGGSGDIVMTQSPDSLAVSLGERATINCRASKSVSTSGYSFMHWYQQKPGQPPKLLIYLASNLESGVPDRFSGSGSGTDFTLTISSLQAEDVAVYYCQHSREVPWTFGQGTKVEIKESKYGPPCPSCPIYIWAPLAGTCGVLLLSLVITLYCNHRNALYLLRRDQRLPPDAHKPPGGGSFRTPIQEEQADAHSTLAKIYFLGRLVPRGRGAAEAATRKQRITETESPYQELQGQRSDVYSDLNTQRPYYK

SEQ ID NO: 2864 - protein, 379 aa, Artificial Sequence
  CAT-CD70-350 (without signal peptide)
QVQLVQSGAEVKKPGASVKVSCKASGYTFTNYGMNWVRQAPGQGLKWMGWINTYTGEPTYADAFKGRVTMTRDTSISTAYMELSRLRSDDTAVYYCARDYGDYGMDYWGQGTTVTVSSGGGGSGGGGSGGGGSGDIVMTQSPDSLAVSLGERATINCRASKSVSTSGYSFMHWYQQKPGQPPKLLIYLASNLESGVPDRFSGSGSGTDFTLTISSLQAEDVAVYYCQHSREVPWTFGQGTKVEIKESKYGPPCPSCPIYIWAPLAGTCGVLLLSLVITLYCNHRNALYLLRRDQRLPPDAHKPPGGGSFRTPIQEEQADAHSTLAKIYFLGRLVPRGRGAAEAATRKQRITETESPYQELQGQRSDVYSDLNTQRPYYK

SEQ ID NO: 2865 - protein, 507 aa, Artificial Sequence
  CAT-CD70-351
MALPVTALLLPLALLLHAARPQVQLVQSGAEVKKPGASVKVSCKASGYTFTNYGMNWVRQAPGQGLKWMGWINTYTGEPTYADAFKGRVTMTRDTSISTAYMELSRLRSDDTAVYYCARDYGDYGMDYWGQGTTVTVSSGGGGSGGGGSGGGGSGDIVMTQSPDSLAVSLGERATINCRASKSVSTSGYSFMHWYQQKPGQPPKLLIYLASNLESGVPDRFSGSGSGTDFTLTISSLQAEDVAVYYCQHSREVPWTFGQGTKVEIKESKYGPPCPSCPGQPREPQVYTLPPSQEEMTKNQVSLTCLVKGFYPSDIAVEWESNGQPENNYKTTPPVLDSDGSFFLYSRLTVDKSRWQEGNVFSCSVMHEALHNHYTQKSLSLSLGKIYIWAPLAGTCGVLLLSLVITLYCNHRNALYLLRRDQRLPPDAHKPPGGGSFRTPIQEEQADAHSTLAKIYFLGRLVPRGRGAAEAATRKQRITETESPYQELQGQRSDVYSDLNTQRPYYK

SEQ ID NO: 2866 - protein, 486 aa, Artificial Sequence
  CAT-CD70-351 (without signal peptide)
QVQLVQSGAEVKKPGASVKVSCKASGYTFTNYGMNWVRQAPGQGLKWMGWINTYTGEPTYADAFKGRVTMTRDTSISTAYMELSRLRSDDTAVYYCARDYGDYGMDYWGQGTTVTVSSGGGGSGGGGSGGGGSGDIVMTQSPDSLAVSLGERATINCRASKSVSTSGYSFMHWYQQKPGQPPKLLIYLASNLESGVPDRFSGSGSGTDFTLTISSLQAEDVAVYYCQHSREVPWTFGQGTKVEIKESKYGPPCPSCPGQPREPQVYTLPPSQEEMTKNQVSLTCLVKGFYPSDIAVEWESNGQPENNYKTTPPVLDSDGSFFLYSRLTVDKSRWQEGNVFSCSVMHEALHNHYTQKSLSLSLGKIYIWAPLAGTCGVLLLSLVITLYCNHRNALYLLRRDQRLPPDAHKPPGGGSFRTPIQEEQADAHSTLAKIYFLGRLVPRGRGAAEAATRKQRITETESPYQELQGQRSDVYSDLNTQRPYYK

SEQ ID NO: 2867 - protein, 617 aa, Artificial Sequence
  CAT-CD70-352
MALPVTALLLPLALLLHAARPQVQLVQSGAEVKKPGASVKVSCKASGYTFTNYGMNWVRQAPGQGLKWMGWINTYTGEPTYADAFKGRVTMTRDTSISTAYMELSRLRSDDTAVYYCARDYGDYGMDYWGQGTTVTVSSGGGGSGGGGSGGGGSGDIVMTQSPDSLAVSLGERATINCRASKSVSTSGYSFMHWYQQKPGQPPKLLIYLASNLESGVPDRFSGSGSGTDFTLTISSLQAEDVAVYYCQHSREVPWTFGQGTKVEIKESKYGPPCPSCPAPEFLGGPSVFLFPPKPKDTLMISRTPEVTCVVVDVSQEDPEVQFNWYVDGVEVHNAKTKPREEQFNSTYRVVSVLTVLHQDWLNGKEYKCKVSNKGLPSSIEKTISKAKGQPREPQVYTLPPSQEEMTKNQVSLTCLVKGFYPSDIAVEWESNGQPENNYKTTPPVLDSDGSFFLYSRLTVDKSRWQEGNVFSCSVMHEALHNHYTQKSLSLSLGKIYIWAPLAGTCGVLLLSLVITLYCNHRNALYLLRRDQRLPPDAHKPPGGGSFRTPIQEEQADAHSTLAKIYFLGRLVPRGRGAAEAATRKQRITETESPYQELQGQRSDVYSDLNTQRPYYK

SEQ ID NO: 2868 - protein, 596 aa, Artificial Sequence
  CAT-CD70-352 (without signal peptide)
QVQLVQSGAEVKKPGASVKVSCKASGYTFTNYGMNWVRQAPGQGLKWMGWINTYTGEPTYADAFKGRVTMTRDTSISTAYMELSRLRSDDTAVYYCARDYGDYGMDYWGQGTTVTVSSGGGGSGGGGSGGGGSGDIVMTQSPDSLAVSLGERATINCRASKSVSTSGYSFMHWYQQKPGQPPKLLIYLASNLESGVPDRFSGSGSGTDFTLTISSLQAEDVAVYYCQHSREVPWTFGQGTKVEIKESKYGPPCPSCPAPEFLGGPSVFLFPPKPKDTLMISRTPEVTCVVVDVSQEDPEVQFNWYVDGVEVHNAKTKPREEQFNSTYRVVSVLTVLHQDWLNGKEYKCKVSNKGLPSSIEKTISKAKGQPREPQVYTLPPSQEEMTKNQVSLTCLVKGFYPSDIAVEWESNGQPENNYKTTPPVLDSDGSFFLYSRLTVDKSRWQEGNVFSCSVMHEALHNHYTQKSLSLSLGKIYIWAPLAGTCGVLLLSLVITLYCNHRNALYLLRRDQRLPPDAHKPPGGGSFRTPIQEEQADAHSTLAKIYFLGRLVPRGRGAAEAATRKQRITETESPYQELQGQRSDVYSDLNTQRPYYK

SEQ ID NO: 2869 - protein, 617 aa, Artificial Sequence
  CAT-CD70-353
MALPVTALLLPLALLLHAARPQVQLVQSGAEVKKPGASVKVSCKASGYTFTNYGMNWVRQAPGQGLKWMGWINTYTGEPTYADAFKGRVTMTRDTSISTAYMELSRLRSDDTAVYYCARDYGDYGMDYWGQGTTVTVSSGGGGSGGGGSGGGGSGDIVMTQSPDSLAVSLGERATINCRASKSVSTSGYSFMHWYQQKPGQPPKLLIYLASNLESGVPDRFSGSGSGTDFTLTISSLQAEDVAVYYCQHSREVPWTFGQGTKVEIKESKYGPPCPSCPAPEFEGGPSVFLFPPKPKDTLMISRTPEVTCVVVDVSQEDPEVQFNWYVDGVEVHNAKTKPREEQFQSTYRVVSVLTVLHQDWLNGKEYKCKVSNKGLPSSIEKTISKAKGQPREPQVYTLPPSQEEMTKNQVSLTCLVKGFYPSDIAVEWESNGQPENNYKTTPPVLDSDGSFFLYSRLTVDKSRWQEGNVFSCSVMHEALHNHYTQKSLSLSLGKIYIWAPLAGTCGVLLLSLVITLYCNHRNALYLLRRDQRLPPDAHKPPGGGSFRTPIQEEQADAHSTLAKIYFLGRLVPRGRGAAEAATRKQRITETESPYQELQGQRSDVYSDLNTQRPYYK

SEQ ID NO: 2870 - protein, 596 aa, Artificial Sequence
  CAT-CD70-353 (without signal peptide)
QVQLVQSGAEVKKPGASVKVSCKASGYTFTNYGMNWVRQAPGQGLKWMGWINTYTGEPTYADAFKGRVTMTRDTSISTAYMELSRLRSDDTAVYYCARDYGDYGMDYWGQGTTVTVSSGGGGSGGGGSGGGGSGDIVMTQSPDSLAVSLGERATINCRASKSVSTSGYSFMHWYQQKPGQPPKLLIYLASNLESGVPDRFSGSGSGTDFTLTISSLQAEDVAVYYCQHSREVPWTFGQGTKVEIKESKYGPPCPSCPAPEFEGGPSVFLFPPKPKDTLMISRTPEVTCVVVDVSQEDPEVQFNWYVDGVEVHNAKTKPREEQFQSTYRVVSVLTVLHQDWLNGKEYKCKVSNKGLPSSIEKTISKAKGQPREPQVYTLPPSQEEMTKNQVSLTCLVKGFYPSDIAVEWESNGQPENNYKTTPPVLDSDGSFFLYSRLTVDKSRWQEGNVFSCSVMHEALHNHYTQKSLSLSLGKIYIWAPLAGTCGVLLLSLVITLYCNHRNALYLLRRDQRLPPDAHKPPGGGSFRTPIQEEQADAHSTLAKIYFLGRLVPRGRGAAEAATRKQRITETESPYQELQGQRSDVYSDLNTQRPYYK

SEQ ID NO: 2871 - protein, 421 aa, Artificial Sequence
  CAT-CD70-354
MALPVTALLLPLALLLHAARPQVQLVQSGAEVKKPGASVKVSCKASGYTFTNYGMNWVRQAPGQGLKWMGWINTYTGEPTYADAFKGRVTMTRDTSISTAYMELSRLRSDDTAVYYCARDYGDYGMDYWGQGTTVTVSSGGGGSGGGGSGGGGSGDIVMTQSPDSLAVSLGERATINCRASKSVSTSGYSFMHWYQQKPGQPPKLLIYLASNLESGVPDRFSGSGSGTDFTLTISSLQAEDVAVYYCQHSREVPWTFGQGTKVEIKTTTPAPRPPTPAPTIASQPLSLRPEACRPAAGGAVHTRGLDFACDFWVLVVVGGVLACYSLLVTVAFIIFWVRSKRSRLLHSDYMNMTPRRPGPTRKHYQPYAPPRDFAAYRSRLKIQVRKAAITSYEKSDGVYTGLSTRNQETYETLKHEKPPQ

SEQ ID NO: 2872 - protein, 400 aa, Artificial Sequence
  CAT-CD70-354 (without signal peptide)
QVQLVQSGAEVKKPGASVKVSCKASGYTFTNYGMNWVRQAPGQGLKWMGWINTYTGEPTYADAFKGRVTMTRDTSISTAYMELSRLRSDDTAVYYCARDYGDYGMDYWGQGTTVTVSSGGGGSGGGGSGGGGSGDIVMTQSPDSLAVSLGERATINCRASKSVSTSGYSFMHWYQQKPGQPPKLLIYLASNLESGVPDRFSGSGSGTDFTLTISSLQAEDVAVYYCQHSREVPWTFGQGTKVEIKTTTPAPRPPTPAPTIASQPLSLRPEACRPAAGGAVHTRGLDFACDFWVLVVVGGVLACYSLLVTVAFIIFWVRSKRSRLLHSDYMNMTPRRPGPTRKHYQPYAPPRDFAAYRSRLKIQVRKAAITSYEKSDGVYTGLSTRNQETYETLKHEKPPQ

SEQ ID NO: 2873 - protein, 395 aa, Artificial Sequence
  CAT-CD70-355
MALPVTALLLPLALLLHAARPQVQLVQSGAEVKKPGASVKVSCKASGYTFTNYGMNWVRQAPGQGLKWMGWINTYTGEPTYADAFKGRVTMTRDTSISTAYMELSRLRSDDTAVYYCARDYGDYGMDYWGQGTTVTVSSGGGGSGGGGSGGGGSGDIVMTQSPDSLAVSLGERATINCRASKSVSTSGYSFMHWYQQKPGQPPKLLIYLASNLESGVPDRFSGSGSGTDFTLTISSLQAEDVAVYYCQHSREVPWTFGQGTKVEIKAEPKSPDKTHTCPPCPKDPFWVLVVVGGVLACYSLLVTVAFIIFWVRSKRSRLLHSDYMNMTPRRPGPTRKHYQPYAPPRDFAAYRSRLKIQVRKAAITSYEKSDGVYTGLSTRNQETYETLKHEKPPQ

SEQ ID NO: 2874 - protein, 374 aa, Artificial Sequence
  CAT-CD70-355 (without signal peptide)
QVQLVQSGAEVKKPGASVKVSCKASGYTFTNYGMNWVRQAPGQGLKWMGWINTYTGEPTYADAFKGRVTMTRDTSISTAYMELSRLRSDDTAVYYCARDYGDYGMDYWGQGTTVTVSSGGGGSGGGGSGGGGSGDIVMTQSPDSLAVSLGERATINCRASKSVSTSGYSFMHWYQQKPGQPPKLLIYLASNLESGVPDRFSGSGSGTDFTLTISSLQAEDVAVYYCQHSREVPWTFGQGTKVEIKAEPKSPDKTHTCPPCPKDPFWVLVVVGGVLACYSLLVTVAFIIFWVRSKRSRLLHSDYMNMTPRRPGPTRKHYQPYAPPRDFAAYRSRLKIQVRKAAITSYEKSDGVYTGLSTRNQETYETLKHEKPPQ

SEQ ID NO: 2875 - protein, 388 aa, Artificial Sequence
  CAT-CD70-356
MALPVTALLLPLALLLHAARPQVQLVQSGAEVKKPGASVKVSCKASGYTFTNYGMNWVRQAPGQGLKWMGWINTYTGEPTYADAFKGRVTMTRDTSISTAYMELSRLRSDDTAVYYCARDYGDYGMDYWGQGTTVTVSSGGGGSGGGGSGGGGSGDIVMTQSPDSLAVSLGERATINCRASKSVSTSGYSFMHWYQQKPGQPPKLLIYLASNLESGVPDRFSGSGSGTDFTLTISSLQAEDVAVYYCQHSREVPWTFGQGTKVEIKESKYGPPCPSCPFWVLVVVGGVLACYSLLVTVAFIIFWVRSKRSRLLHSDYMNMTPRRPGPTRKHYQPYAPPRDFAAYRSRLKIQVRKAAITSYEKSDGVYTGLSTRNQETYETLKHEKPPQ

SEQ ID NO: 2876 - protein, 367 aa, Artificial Sequence
  CAT-CD70-356 (without signal peptide)
QVQLVQSGAEVKKPGASVKVSCKASGYTFTNYGMNWVRQAPGQGLKWMGWINTYTGEPTYADAFKGRVTMTRDTSISTAYMELSRLRSDDTAVYYCARDYGDYGMDYWGQGTTVTVSSGGGGSGGGGSGGGGSGDIVMTQSPDSLAVSLGERATINCRASKSVSTSGYSFMHWYQQKPGQPPKLLIYLASNLESGVPDRFSGSGSGTDFTLTISSLQAEDVAVYYCQHSREVPWTFGQGTKVEIKESKYGPPCPSCPFWVLVVVGGVLACYSLLVTVAFIIFWVRSKRSRLLHSDYMNMTPRRPGPTRKHYQPYAPPRDFAAYRSRLKIQVRKAAITSYEKSDGVYTGLSTRNQETYETLKHEKPPQ

SEQ ID NO: 2877 - protein, 495 aa, Artificial Sequence
  CAT-CD70-357
MALPVTALLLPLALLLHAARPQVQLVQSGAEVKKPGASVKVSCKASGYTFTNYGMNWVRQAPGQGLKWMGWINTYTGEPTYADAFKGRVTMTRDTSISTAYMELSRLRSDDTAVYYCARDYGDYGMDYWGQGTTVTVSSGGGGSGGGGSGGGGSGDIVMTQSPDSLAVSLGERATINCRASKSVSTSGYSFMHWYQQKPGQPPKLLIYLASNLESGVPDRFSGSGSGTDFTLTISSLQAEDVAVYYCQHSREVPWTFGQGTKVEIKESKYGPPCPSCPGQPREPQVYTLPPSQEEMTKNQVSLTCLVKGFYPSDIAVEWESNGQPENNYKTTPPVLDSDGSFFLYSRLTVDKSRWQEGNVFSCSVMHEALHNHYTQKSLSLSLGKFWVLVVVGGVLACYSLLVTVAFIIFWVRSKRSRLLHSDYMNMTPRRPGPTRKHYQPYAPPRDFAAYRSRLKIQVRKAAITSYEKSDGVYTGLSTRNQETYETLKHEKPPQ

SEQ ID NO: 2878 - protein, 474 aa, Artificial Sequence
  CAT-CD70-357 (without signal peptide)
QVQLVQSGAEVKKPGASVKVSCKASGYTFTNYGMNWVRQAPGQGLKWMGWINTYTGEPTYADAFKGRVTMTRDTSISTAYMELSRLRSDDTAVYYCARDYGDYGMDYWGQGTTVTVSSGGGGSGGGGSGGGGSGDIVMTQSPDSLAVSLGERATINCRASKSVSTSGYSFMHWYQQKPGQPPKLLIYLASNLESGVPDRFSGSGSGTDFTLTISSLQAEDVAVYYCQHSREVPWTFGQGTKVEIKESKYGPPCPSCPGQPREPQVYTLPPSQEEMTKNQVSLTCLVKGFYPSDIAVEWESNGQPENNYKTTPPVLDSDGSFFLYSRLTVDKSRWQEGNVFSCSVMHEALHNHYTQKSLSLSLGKFWVLVVVGGVLACYSLLVTVAFIIFWVRSKRSRLLHSDYMNMTPRRPGPTRKHYQPYAPPRDFAAYRSRLKIQVRKAAITSYEKSDGVYTGLSTRNQETYETLKHEKPPQ

SEQ ID NO: 2879 - protein, 605 aa, Artificial Sequence
  CAT-CD70-358
MALPVTALLLPLALLLHAARPQVQLVQSGAEVKKPGASVKVSCKASGYTFTNYGMNWVRQAPGQGLKWMGWINTYTGEPTYADAFKGRVTMTRDTSISTAYMELSRLRSDDTAVYYCARDYGDYGMDYWGQGTTVTVSSGGGGSGGGGSGGGGSGDIVMTQSPDSLAVSLGERATINCRASKSVSTSGYSFMHWYQQKPGQPPKLLIYLASNLESGVPDRFSGSGSGTDFTLTISSLQAEDVAVYYCQHSREVPWTFGQGTKVEIKESKYGPPCPSCPAPEFLGGPSVFLFPPKPKDTLMISRTPEVTCVVVDVSQEDPEVQFNWYVDGVEVHNAKTKPREEQFNSTYRVVSVLTVLHQDWLNGKEYKCKVSNKGLPSSIEKTISKAKGQPREPQVYTLPPSQEEMTKNQVSLTCLVKGFYPSDIAVEWESNGQPENNYKTTPPVLDSDGSFFLYSRLTVDKSRWQEGNVFSCSVMHEALHNHYTQKSLSLSLGKFWVLVVVGGVLACYSLLVTVAFIIFWVRSKRSRLLHSDYMNMTPRRPGPTRKHYQPYAPPRDFAAYRSRLKIQVRKAAITSYEKSDGVYTGLSTRNQETYETLKHEKPPQ

SEQ ID NO: 2880 - protein, 584 aa, Artificial Sequence
  CAT-CD70-358 (without signal peptide)
QVQLVQSGAEVKKPGASVKVSCKASGYTFTNYGMNWVRQAPGQGLKWMGWINTYTGEPTYADAFKGRVTMTRDTSISTAYMELSRLRSDDTAVYYCARDYGDYGMDYWGQGTTVTVSSGGGGSGGGGSGGGGSGDIVMTQSPDSLAVSLGERATINCRASKSVSTSGYSFMHWYQQKPGQPPKLLIYLASNLESGVPDRFSGSGSGTDFTLTISSLQAEDVAVYYCQHSREVPWTFGQGTKVEIKESKYGPPCPSCPAPEFLGGPSVFLFPPKPKDTLMISRTPEVTCVVVDVSQEDPEVQFNWYVDGVEVHNAKTKPREEQFNSTYRVVSVLTVLHQDWLNGKEYKCKVSNKGLPSSIEKTISKAKGQPREPQVYTLPPSQEEMTKNQVSLTCLVKGFYPSDIAVEWESNGQPENNYKTTPPVLDSDGSFFLYSRLTVDKSRWQEGNVFSCSVMHEALHNHYTQKSLSLSLGKFWVLVVVGGVLACYSLLVTVAFIIFWVRSKRSRLLHSDYMNMTPRRPGPTRKHYQPYAPPRDFAAYRSRLKIQVRKAAITSYEKSDGVYTGLSTRNQETYETLKHEKPPQ

SEQ ID NO: 2881 - protein, 605 aa, Artificial Sequence
  CAT-CD70-359
MALPVTALLLPLALLLHAARPQVQLVQSGAEVKKPGASVKVSCKASGYTFTNYGMNWVRQAPGQGLKWMGWINTYTGEPTYADAFKGRVTMTRDTSISTAYMELSRLRSDDTAVYYCARDYGDYGMDYWGQGTTVTVSSGGGGSGGGGSGGGGSGDIVMTQSPDSLAVSLGERATINCRASKSVSTSGYSFMHWYQQKPGQPPKLLIYLASNLESGVPDRFSGSGSGTDFTLTISSLQAEDVAVYYCQHSREVPWTFGQGTKVEIKESKYGPPCPSCPAPEFEGGPSVFLFPPKPKDTLMISRTPEVTCVVVDVSQEDPEVQFNWYVDGVEVHNAKTKPREEQFQSTYRVVSVLTVLHQDWLNGKEYKCKVSNKGLPSSIEKTISKAKGQPREPQVYTLPPSQEEMTKNQVSLTCLVKGFYPSDIAVEWESNGQPENNYKTTPPVLDSDGSFFLYSRLTVDKSRWQEGNVFSCSVMHEALHNHYTQKSLSLSLGKFWVLVVVGGVLACYSLLVTVAFIIFWVRSKRSRLLHSDYMNMTPRRPGPTRKHYQPYAPPRDFAAYRSRLKIQVRKAAITSYEKSDGVYTGLSTRNQETYETLKHEKPPQ

SEQ ID NO: 2882 - protein, 584 aa, Artificial Sequence
  CAT-CD70-359 (without signal peptide)
QVQLVQSGAEVKKPGASVKVSCKASGYTFTNYGMNWVRQAPGQGLKWMGWINTYTGEPTYADAFKGRVTMTRDTSISTAYMELSRLRSDDTAVYYCARDYGDYGMDYWGQGTTVTVSSGGGGSGGGGSGGGGSGDIVMTQSPDSLAVSLGERATINCRASKSVSTSGYSFMHWYQQKPGQPPKLLIYLASNLESGVPDRFSGSGSGTDFTLTISSLQAEDVAVYYCQHSREVPWTFGQGTKVEIKESKYGPPCPSCPAPEFEGGPSVFLFPPKPKDTLMISRTPEVTCVVVDVSQEDPEVQFNWYVDGVEVHNAKTKPREEQFQSTYRVVSVLTVLHQDWLNGKEYKCKVSNKGLPSSIEKTISKAKGQPREPQVYTLPPSQEEMTKNQVSLTCLVKGFYPSDIAVEWESNGQPENNYKTTPPVLDSDGSFFLYSRLTVDKSRWQEGNVFSCSVMHEALHNHYTQKSLSLSLGKFWVLVVVGGVLACYSLLVTVAFIIFWVRSKRSRLLHSDYMNMTPRRPGPTRKHYQPYAPPRDFAAYRSRLKIQVRKAAITSYEKSDGVYTGLSTRNQETYETLKHEKPPQ

SEQ ID NO: 2883 - DNA, 20 bp, Artificial Sequence
  CD70_sgRNA_01
cgccgcggcgatgccggagg

SEQ ID NO: 2884 - DNA, 20 bp, Artificial Sequence
  CD70_sgRNA_02
gccgcggcgatgccggagga

SEQ ID NO: 2885 - DNA, 20 bp, Artificial Sequence
  CD70_sgRNA_03
gagcagcccgaaccctcctc

SEQ ID NO: 2886 - DNA, 20 bp, Artificial Sequence
  CD70_sgRNA_04
ggcgatgccggaggagggtt

SEQ ID NO: 2887 - DNA, 20 bp, Artificial Sequence
  CD70_sgRNA_05
gcgatgccggaggagggttc

SEQ ID NO: 2888 - DNA, 20 bp, Artificial Sequence
  CD70_sgRNA_06
ggaggagggttcgggctgct

SEQ ID NO: 2889 - DNA, 20 bp, Artificial Sequence
  CD70_sgRNA_07
agggttcgggctgctcggtg

SEQ ID NO: 2890 - DNA, 20 bp, Artificial Sequence
  CD70_sgRNA_08
cgggctgctcggtgcggcgc

SEQ ID NO: 2891 - DNA, 20 bp, Artificial Sequence
  CD70_sgRNA_09
tcggtgcggcgcaggcccta

SEQ ID NO: 2892 - DNA, 20 bp, Artificial Sequence
  CD70_sgRNA_10
cggtgcggcgcaggccctat

SEQ ID NO: 2893 - DNA, 20 bp, Artificial Sequence
  CD70_sgRNA_11
gcccgcaggacgcacccata

SEQ ID NO: 2894 - DNA, 20 bp, Artificial Sequence
  CD70_sgRNA_12
agcccgcaggacgcacccat

SEQ ID NO: 2895 - DNA, 20 bp, Artificial Sequence
  CD70_sgRNA_13
ggccctatgggtgcgtcctg

SEQ ID NO: 2896 - DNA, 20 bp, Artificial Sequence
  CD70_sgRNA_14
gccctatgggtgcgtcctgc

SEQ ID NO: 2897 - DNA, 20 bp, Artificial Sequence
  CD70_sgRNA_15
atgggaccaaagcagcccgc

SEQ ID NO: 2898 - DNA, 20 bp, Artificial Sequence
  CD70_sgRNA_16
gtgcgtcctgcgggctgctt

SEQ ID NO: 2899 - DNA, 20 bp, Artificial Sequence
  CD70_sgRNA_17
gcgggctgctttggtcccat

SEQ ID NO: 2900 - DNA, 20 bp, Artificial Sequence
  CD70_sgRNA_19
atcaccaagcccgcgaccaa

SEQ ID NO: 2901 - DNA, 20 bp, Artificial Sequence
  CD70_sgRNA_20
tgctttggtcccattggtcg

SEQ ID NO: 2902 - DNA, 20 bp, Artificial Sequence
  CD70_sgRNA_21
gctttggtcccattggtcgc

SEQ ID NO: 2903 - DNA, 20 bp, Artificial Sequence
  CD70_sgRNA_22
ggtcccattggtcgcgggct

SEQ ID NO: 2904 - DNA, 20 bp, Artificial Sequence
  CD70_sgRNA_23
gggcttggtgatctgcctcg

SEQ ID NO: 2905 - DNA, 20 bp, Artificial Sequence
  CD70_sgRNA_24
agcgctggatgcacaccacg

SEQ ID NO: 2906 - DNA, 20 bp, Artificial Sequence
  CD70_sgRNA_25
gctgagcctgtgcgaagcgc

SEQ ID NO: 2907 - DNA, 20 bp, Artificial Sequence
  CD70_sgRNA_26
gtgcatccagcgcttcgcac

SEQ ID NO: 2908 - DNA, 20 bp, Artificial Sequence
  CD70_sgRNA_27
ctcaccccaagtgactcgag

SEQ ID NO: 2909 - DNA, 20 bp, Artificial Sequence
  CD70_sgRNA_28
cagctgccgctcgagtcact

SEQ ID NO: 2910 - DNA, 20 bp, Artificial Sequence
  CD70_sgRNA_29
agctgccgctcgagtcactt

SEQ ID NO: 2911 - DNA, 20 bp, Artificial Sequence
  CD70_sgRNA_30
gctgccgctcgagtcacttg

SEQ ID NO: 2912 - DNA, 20 bp, Artificial Sequence
  CD70_sgRNA_31
gcagctcagctacgtcccac

SEQ ID NO: 2913 - DNA, 20 bp, Artificial Sequence
  CD70_sgRNA_32
gagctgcagctgaatcacac

SEQ ID NO: 2914 - DNA, 20 bp, Artificial Sequence
  CD70_sgRNA_33
gggtcctgctgaggtcctgg

SEQ ID NO: 2915 - DNA, 20 bp, Artificial Sequence
  CD70_sgRNA_34
ggggtcctgctgaggtcctg

SEQ ID NO: 2916 - DNA, 20 bp, Artificial Sequence
  CD70_sgRNA_35
tggggtcctgctgaggtcct

SEQ ID NO: 2917 - DNA, 20 bp, Artificial Sequence
  CD70_sgRNA_36
ctggggtcctgctgaggtcc

SEQ ID NO: 2918 - DNA, 20 bp, Artificial Sequence
  CD70_sgRNA_37
tgtgcccccaggacctcagc

SEQ ID NO: 2919 - DNA, 20 bp, Artificial Sequence
  CD70_sgRNA_38
tatagcctggggtcctgctg

SEQ ID NO: 2920 - DNA, 20 bp, Artificial Sequence
  CD70_sgRNA_39
caggacctcagcaggacccc

SEQ ID NO: 2921 - DNA, 20 bp, Artificial Sequence
  CD70_sgRNA_40
ccccctgccagtatagcctg

SEQ ID NO: 2922 - DNA, 20 bp, Artificial Sequence
  CD70_sgRNA_41
cccccctgccagtatagcct

SEQ ID NO: 2923 - DNA, 20 bp, Artificial Sequence
  CD70_sgRNA_42
gcccccctgccagtatagcc

SEQ ID NO: 2924 - DNA, 20 bp, Artificial Sequence
  CD70_sgRNA_43
agcaggaccccaggctatac

SEQ ID NO: 2925 - DNA, 20 bp, Artificial Sequence
  CD70_sgRNA_44
ggaccccaggctatactggc

SEQ ID NO: 2926 - DNA, 20 bp, Artificial Sequence
  CD70_sgRNA_45
gaccccaggctatactggca

SEQ ID NO: 2927 - DNA, 20 bp, Artificial Sequence
  CD70_sgRNA_46
accccaggctatactggcag

SEQ ID NO: 2928 - DNA, 20 bp, Artificial Sequence
  CD70_sgRNA_47
ccccaggctatactggcagg

SEQ ID NO: 2929 - DNA, 20 bp, Artificial Sequence
  CD70_sgRNA_48
cccaggctatactggcaggg

SEQ ID NO: 2930 - DNA, 20 bp, Artificial Sequence
  CD70_sgRNA_49
ctggcaggggggcccagcac

SEQ ID NO: 2931 - DNA, 20 bp, Artificial Sequence
  CD70_sgRNA_50
tggcaggggggcccagcact

SEQ ID NO: 2932 - DNA, 20 bp, Artificial Sequence
  CD70_sgRNA_51
ggaaggagcggcccagtgct

SEQ ID NO: 2933 - DNA, 20 bp, Artificial Sequence
  CD70_sgRNA_52
aggaaggagcggcccagtgc

SEQ ID NO: 2934 - DNA, 20 bp, Artificial Sequence
  CD70_sgRNA_53
ctggtccatgcaggaaggag

SEQ ID NO: 2935 - DNA, 20 bp, Artificial Sequence
  CD70_sgRNA_54
cagctctggtccatgcagga

SEQ ID NO: 2936 - DNA, 20 bp, Artificial Sequence
  CD70_sgRNA_55
ctgggccgctccttcctgca

SEQ ID NO: 2937 - DNA, 20 bp, Artificial Sequence
  CD70_sgRNA_56
tgtccagctctggtccatgc

SEQ ID NO: 2938 - DNA, 20 bp, Artificial Sequence
  CD70_sgRNA_57
cttcctgcatggaccagagc

SEQ ID NO: 2939 - DNA, 20 bp, Artificial Sequence
  CD70_sgRNA_58
agctgccccttgtccagctc

SEQ ID NO: 2940 - DNA, 20 bp, Artificial Sequence
  CD70_sgRNA_59
gcatggaccagagctggaca

SEQ ID NO: 2941 - DNA, 20 bp, Artificial Sequence
  CD70_sgRNA_60
catggaccagagctggacaa

SEQ ID NO: 2942 - DNA, 20 bp, Artificial Sequence
  CD70_sgRNA_61
atggaccagagctggacaag

SEQ ID NO: 2943 - DNA, 20 bp, Artificial Sequence
  CD70_sgRNA_63
ccatgtagatgccatcacga

SEQ ID NO: 2944 - DNA, 20 bp, Artificial Sequence
  CD70_sgRNA_64
ccatcgtgatggcatctaca

SEQ ID NO: 2945 - DNA, 20 bp, Artificial Sequence
  CD70_sgRNA_65
catctacatggtacacatcc
